(19) United States
(12) Patent Application Publication
(10) Pub. No.: US 2024/0352458 A1
(43) Pub. Date: Oct. 24, 2024

(54) DOUBLE STRANDED NUCLEIC ACID COMPOUNDS INHIBITING ZPI

(71) Applicant: E-Therapeutics PLC, London (GB)

(72) Inventors: Amy MCCARTHY, London (GB); Graham CRAGGS, London (GB); James LONGDEN, London (GB); Ines DE SANTIAGO, London (GB); Duncan BROWN, London (GB); Ahmad Ali MORTAZAVI, London (GB); Viviana MANNELLA, London (GB); Muthusamy JAYARAMAN, London (GB); Alexandre DEBACKER, London (GB); Adrian James MOGG, London (GB)

(21) Appl. No.: 18/624,912

(22) Filed: Apr. 2, 2024

Related U.S. Application Data
(63) Continuation of application No. PCT/EP2023/070899, filed on Jul. 27, 2023.
(60) Provisional application No. 63/369,631, filed on Jul. 27, 2022.

(30) Foreign Application Priority Data
Feb. 6, 2023 (EP) 23155105.2

(51) Int. Cl. C12N 15/113; A61P 7/04

(52) U.S. Cl. CPC C12N 15/113; A61P 7/04; C12N 2310/14; C12N 2310/315; C12N 2310/351

(57) ABSTRACT

The present invention provides novel nucleic acid compound suitable for therapeutic use. Additionally, the present invention provides methods of making these compounds, as well as methods of using such compounds for the treatment of various diseases and conditions.

### CROSS REFERENCE TO RELATED APPLICATIONS

[0001] This application is Continuation of International Application No. PCT/EP2023/070899, filed internationally on Jul. 27, 2023, which claims the priority benefit of European Application No. 23155105.2, filed on Feb. 6, 2023, and U.S. Provisional Patent Application No. 63/369,631, filed on Jul. 27, 2022, the contents of each of which are incorporated herein by reference in their entirety.

### REFERENCE TO AN ELECTRONIC SEQUENCE LISTING

[0002] The contents of the electronic sequence listing (228792000901SUBSEQLIST.xml; Size: 6,295,702 bytes; and Date of Creation: Apr. 12, 2024) is herein incorporated by reference in its entirety.

### FIELD OF THE INVENTION

[0003] The present invention provides novel nucleic acid compounds, suitable for therapeutic use. Additionally, the present invention provides methods of making these compounds, as well as methods of using such compounds for the treatment of various diseases and conditions.

### BACKGROUND OF THE INVENTION

[0004] Nucleic acid compounds have important therapeutic applications in medicine. Nucleic acids can be used to silence genes that are responsible for a particular disease. Gene-silencing prevents formation of a protein by inhibiting translation. Importantly, gene-silencing agents are a promising alternative to traditional small, organic compounds that inhibit the function of the protein linked to the disease. siRNA, antisense RNA, and micro-RNA are oligonucleotides/oligonucleosides that prevent the formation of proteins by gene-silencing.

[0005] A number of modified siRNA compounds in particular have been developed in the last two decades for diagnostic and therapeutic purposes, including siRNA/RNAi therapeutic agents for the treatment of various diseases including central-nervous-system diseases, inflammatory diseases, metabolic disorders, oncology, infectious diseases, and ocular diseases.

[0006] The present invention relates to nucleic acid compounds, for use in the treatment and/or prevention of disease.

### BRIEF SUMMARY OF THE INVENTION

[0007] According to a first aspect of the present invention, there is provided a nucleic acid for inhibiting expression of ZPI, comprising a duplex region that comprises a first strand and a second strand that is at least partially complementary to the first strand, wherein said first strand is: (i) at least partially complementary to a portion of RNA transcribed from the ZPI gene, and (ii) comprises at least 17 contiguous nucleosides differing by 0 or 1 nucleosides from any one of the first strand sequences as listed in Table 2.

[0008] According to a second aspect of the present invention, there is provided a nucleic acid for inhibiting expression of ZPI, comprising a duplex region that comprises a first strand and a second strand that is at least partially complementary to the first strand, wherein said first strand is: (i) at least partially complementary to a portion of RNA transcribed from the ZPI gene, and (ii) comprises at least 17 contiguous nucleosides differing by 0 or 1 nucleosides from any one of the first strand modified sequences as listed in Table 3.

[0009] A nucleic acid as described herein, wherein the first strand comprises nucleosides 2-18 of any one of the sequences according to the above first and second aspects of the present invention.

[0010] A nucleic acid according to the above first aspect of the present invention, wherein the second strand comprises a nucleoside sequence of at least 17 contiguous nucleosides differing by 0 or 1 nucleosides from any one of the second strand sequences as listed in Table 2, and wherein the second strand has a region of at least 85% complementarity over the 17 contiguous nucleosides to the first strand.

[0011] A nucleic acid according to the above first aspect of the present invention, wherein the second strand comprises a nucleoside sequence of at least 17 contiguous nucleosides differing by 0 or 1 nucleosides from any one of the second strand sequences as listed in Table 2, and wherein the duplex region comprises at least 14, 15, 16 or 17 complementary base pairs.

[0012] A nucleic acid according to the above second aspect of the present invention, wherein the second strand comprises a nucleoside sequence of at least 17 contiguous nucleosides differing by 0 or 1 nucleosides from any one of the second strand modified sequences as listed in Table 4, and wherein the second strand has a region of at least 85% complementarity over the 17 contiguous nucleosides to the first strand.

[0013] A nucleic acid according to the above second aspect of the present invention, wherein the second strand comprises a nucleoside sequence of at least 17 contiguous nucleosides differing by 0 or 1 nucleosides from any one of the second strand modified sequences as listed in Table 4, and wherein the duplex region comprises at least 14, 15, 16 or 17 complementary base pairs.

[0014] A nucleic acid according to the above first aspect of the present invention, wherein the first strand comprises any one of the first strand sequences as listed in Table 2.

[0015] A nucleic acid according to the above second aspect of the present invention, wherein the first strand comprises any one of the first strand modified sequences as listed in Table 3.

[0016] A nucleic acid according to the above first aspect of the present invention, wherein the second strand comprises any one of the second strand sequences as listed in Table 2.

[0017] A nucleic acid according to the above second aspect of the present invention, wherein the second strand comprises any one of the second strand modified sequences as listed in Table 4.

[0018] A nucleic acid according to the above first aspect of the present invention, wherein the first strand comprises any one of the following sequences: SEQ ID NO: 126, SEQ ID NO: 127, SEQ ID NO: 128, SEQ ID NO: 129, SEQ ID NO: 131, SEQ ID NO: 132, SEQ ID NO: 138, SEQ ID NO: 139, SEQ ID NO: 144, SEQ ID NO: 145, SEQ ID NO: 147, SEQ ID NO: 148, SEQ ID NO: 149, SEQ ID NO: 226, SEQ ID NO: 227, SEQ ID NO: 228, SEQ ID NO: 229, SEQ ID NO: 231, SEQ ID NO: 232, SEQ ID NO: 238, SEQ ID NO: 239.

[0019] A nucleic acid according to the above second aspect of the present invention, wherein the first strand comprises any one of the following sequences: SEQ ID NO: 366, SEQ ID NO: 367, SEQ ID NO: 368, SEQ ID NO: 369, SEQ ID NO: 371, SEQ ID NO: 372, SEQ ID NO: 378, SEQ ID NO: 379, SEQ ID NO: 384, SEQ ID NO: 385, SEQ ID NO: 387, SEQ ID NO: 388, SEQ ID NO: 389, SEQ ID NO: 466, SEQ ID NO: 467, SEQ ID NO: 468, SEQ ID NO: 469, SEQ ID NO: 471, SEQ ID NO: 472, SEQ ID NO: 478, SEQ ID NO: 479, SEQ ID NO: 498, SEQ ID NO: 518, SEQ ID NO: 538, SEQ ID NO: 546, SEQ ID NO: 547, SEQ ID NO: 548, SEQ ID NO: 549, SEQ ID NO: 551, SEQ ID NO: 552, SEQ ID NO: 558, SEQ ID NO: 559.

[0020] A nucleic acid according to the above first aspect of the present invention, wherein the second strand comprises any one of the following sequences: SEQ ID NO: 246, SEQ ID NO: 247, SEQ ID NO: 248, SEQ ID NO: 249, SEQ ID NO: 251, SEQ ID NO: 252, SEQ ID NO: 258, SEQ ID NO: 259, SEQ ID NO: 264, SEQ ID NO: 265, SEQ ID NO: 267, SEQ ID NO: 268, SEQ ID NO: 269, SEQ ID NO: 346, SEQ ID NO: 347, SEQ ID NO: 348, SEQ ID NO: 349, SEQ ID NO: 351, SEQ ID NO: 352, SEQ ID NO: 358, SEQ ID NO: 359.

[0021] A nucleic acid according to the above second aspect of the present invention, wherein the second strand comprises any one of the following sequences: SEQ ID NO: 566, SEQ ID NO: 567, SEQ ID NO: 568, SEQ ID NO: 569, SEQ ID NO: 571, SEQ ID NO: 572, SEQ ID NO: 578, SEQ ID NO: 579, SEQ ID NO: 584, SEQ ID NO: 585, SEQ ID NO: 587, SEQ ID NO: 588, SEQ ID NO: 589, SEQ ID NO: 666, SEQ ID NO: 667, SEQ ID NO: 668, SEQ ID NO: 669, SEQ ID NO: 671, SEQ ID NO: 672, SEQ ID NO: 678, SEQ ID NO: 679, SEQ ID NO: 698, SEQ ID NO: 718, SEQ ID NO: 738, SEQ ID NO: 746, SEQ ID NO: 747, SEQ ID NO: 748, SEQ ID NO: 749, SEQ ID NO: 751, SEQ ID NO: 752, SEQ ID NO: 758, SEQ ID NO: 759.

[0022] A nucleic acid comprising first and second strands that comprise, consist of, or consist essentially of a nucleoside sequence differing by 0 or 1 nucleosides from any one of the following first and second sequences:

| Unmodified first strand | Unmodified second strand |
|---|---|
| SEQ ID NO: 126 | SEQ ID NO: 246 |
| SEQ ID NO: 127 | SEQ ID NO: 247 |
| SEQ ID NO: 128 | SEQ ID NO: 248 |
| SEQ ID NO: 129 | SEQ ID NO: 249 |
| SEQ ID NO: 131 | SEQ ID NO: 251 |
| SEQ ID NO: 132 | SEQ ID NO: 252 |
| SEQ ID NO: 138 | SEQ ID NO: 258 |
| SEQ ID NO: 139 | SEQ ID NO: 259 |
| SEQ ID NO: 144 | SEQ ID NO: 264 |
| SEQ ID NO: 145 | SEQ ID NO: 265 |
| SEQ ID NO: 147 | SEQ ID NO: 267 |
| SEQ ID NO: 148 | SEQ ID NO: 268 |
| SEQ ID NO: 149 | SEQ ID NO: 269 |
| SEQ ID NO: 226 | SEQ ID NO: 346 |
| SEQ ID NO: 227 | SEQ ID NO: 347 |
| SEQ ID NO: 228 | SEQ ID NO: 348 |
| SEQ ID NO: 229 | SEQ ID NO: 349 |
| SEQ ID NO: 231 | SEQ ID NO: 351 |
| SEQ ID NO: 232 | SEQ ID NO: 352 |
| SEQ ID NO: 238 | SEQ ID NO: 358 |
| SEQ ID NO: 239 | SEQ ID NO: 359 |
| SEQ ID NO: 138 | SEQ ID NO: 258 |
| SEQ ID NO: 138 | SEQ ID NO: 258 |
| SEQ ID NO: 138 | SEQ ID NO: 258 |
| SEQ ID NO: 126 | SEQ ID NO: 246 |
| SEQ ID NO: 127 | SEQ ID NO: 247 |
| SEQ ID NO: 128 | SEQ ID NO: 248 |
| SEQ ID NO: 129 | SEQ ID NO: 249 |
| SEQ ID NO: 131 | SEQ ID NO: 251 |
| SEQ ID NO: 132 | SEQ ID NO: 252 |
| SEQ ID NO: 138 | SEQ ID NO: 258 |
| SEQ ID NO: 139 | SEQ ID NO: 259 |

[0023] A nucleic acid comprising first and second strands that comprise, consist of, or consist essentially of a nucleoside sequence differing by 0 or 1 nucleosides from any one of the following first and second sequences:

| Modified first strand | Modified second strand |
|---|---|
| SEQ ID NO: 366 | SEQ ID NO: 566 |
| SEQ ID NO: 367 | SEQ ID NO: 567 |
| SEQ ID NO: 368 | SEQ ID NO: 568 |
| SEQ ID NO: 369 | SEQ ID NO: 569 |
| SEQ ID NO: 371 | SEQ ID NO: 571 |
| SEQ ID NO: 372 | SEQ ID NO: 572 |
| SEQ ID NO: 378 | SEQ ID NO: 578 |
| SEQ ID NO: 379 | SEQ ID NO: 579 |
| SEQ ID NO: 384 | SEQ ID NO: 584 |
| SEQ ID NO: 385 | SEQ ID NO: 585 |
| SEQ ID NO: 387 | SEQ ID NO: 587 |
| SEQ ID NO: 388 | SEQ ID NO: 588 |
| SEQ ID NO: 389 | SEQ ID NO: 589 |
| SEQ ID NO: 466 | SEQ ID NO: 666 |
| SEQ ID NO: 467 | SEQ ID NO: 667 |
| SEQ ID NO: 468 | SEQ ID NO: 668 |
| SEQ ID NO: 469 | SEQ ID NO: 669 |
| SEQ ID NO: 471 | SEQ ID NO: 671 |
| SEQ ID NO: 472 | SEQ ID NO: 672 |
| SEQ ID NO: 478 | SEQ ID NO: 678 |
| SEQ ID NO: 479 | SEQ ID NO: 679 |
| SEQ ID NO: 498 | SEQ ID NO: 698 |
| SEQ ID NO: 518 | SEQ ID NO: 718 |
| SEQ ID NO: 538 | SEQ ID NO: 738 |
| SEQ ID NO: 546 | SEQ ID NO: 746 |
| SEQ ID NO: 547 | SEQ ID NO: 747 |
| SEQ ID NO: 548 | SEQ ID NO: 748 |
| SEQ ID NO: 549 | SEQ ID NO: 749 |
| SEQ ID NO: 551 | SEQ ID NO: 751 |
| SEQ ID NO: 552 | SEQ ID NO: 752 |
| SEQ ID NO: 558 | SEQ ID NO: 758 |
| SEQ ID NO: 559 | SEQ ID NO: 759 |

[0024] A nucleic acid comprising first and second strands that comprise, consist of, or consist essentially of a nucleoside sequence differing by 0 or 1 nucleosides from any one of the following first and second sequences:

| Unmodified first strand | Unmodified second strand |
|---|---|
| SEQ ID NO: 128 | SEQ ID NO: 248 |
| SEQ ID NO: 144 | SEQ ID NO: 264 |
| SEQ ID NO: 148 | SEQ ID NO: 268 |
| SEQ ID NO: 149 | SEQ ID NO: 269 |
| SEQ ID NO: 138 | SEQ ID NO: 258 |

[0025] A nucleic acid comprising first and second strands that comprise, consist of, or consist essentially of a nucleoside sequence differing by 0 or 1 nucleosides from any one of the following first and second sequences:

| Modified first strand | Modified second strand |
|---|---|
| SEQ ID NO: 368 | SEQ ID NO: 568 |
| SEQ ID NO: 384 | SEQ ID NO: 584 |
| SEQ ID NO: 388 | SEQ ID NO: 588 |
| SEQ ID NO: 389 | SEQ ID NO: 589 |
| SEQ ID NO: 538 | SEQ ID NO: 738 |

[0026] A nucleic acid comprising first and second strands that comprise, consist of, or consist essentially of a nucleoside sequence differing by 0 or 1 nucleosides from any one of the following first and second sequences:

| Unmodified first strand | Unmodified second strand |
|---|---|
| SEQ ID NO: 148 | SEQ ID NO: 268 |
| SEQ ID NO: 145 | SEQ ID NO: 265 |
| SEQ ID NO: 144 | SEQ ID NO: 264 |
| SEQ ID NO: 165 | SEQ ID NO: 285 |
| SEQ ID NO: 202 | SEQ ID NO: 322 |

[0027] A nucleic acid comprising first and second strands that comprise, consist of, or consist essentially of a nucleoside sequence differing by 0 or 1 nucleosides from any one of the following first and second sequences:

| Modified first strand | Modified second strand |
|---|---|
| SEQ ID NO: 388 | SEQ ID NO: 588 |
| SEQ ID NO: 385 | SEQ ID NO: 585 |
| SEQ ID NO: 384 | SEQ ID NO: 584 |
| SEQ ID NO: 405 | SEQ ID NO: 605 |
| SEQ ID NO: 442 | SEQ ID NO: 642 |

[0028] A nucleic acid comprising first and second strands that comprise, consist of, or consist essentially of a nucleoside sequence differing by 0 or 1 nucleosides from any one of the following first and second sequences:

| Modified first strand | Modified second strand |
|---|---|
| SEQ ID NO: 762 | SEQ ID NO: 772 |
| SEQ ID NO: 763 | SEQ ID NO: 773 |
| SEQ ID NO: 764 | SEQ ID NO: 774 |
| SEQ ID NO: 765 | SEQ ID NO: 775 |
| SEQ ID NO: 766 | SEQ ID NO: 776 |
| SEQ ID NO: 767 | SEQ ID NO: 777 |
| SEQ ID NO: 768 | SEQ ID NO: 778 |
| SEQ ID NO: 769 | SEQ ID NO: 779 |
| SEQ ID NO: 770 | SEQ ID NO: 780 |
| SEQ ID NO: 771 | SEQ ID NO: 781 |
| SEQ ID NO: 782 | SEQ ID NO: 773 |
| SEQ ID NO: 783 | SEQ ID NO: 775 |
| SEQ ID NO: 784 | SEQ ID NO: 777 |
| SEQ ID NO: 785 | SEQ ID NO: 779 |
| SEQ ID NO: 786 | SEQ ID NO: 781 |

[0029] A nucleic acid comprising first and second strands that comprise, consist of, or consist essentially of a nucleoside sequence differing by 0 or 1 nucleosides from any one of the following first and second sequences:

| Modified first strand | Modified second strand |
|---|---|
| SEQ ID NO: 385 | SEQ ID NO: 585 |
| SEQ ID NO: 388 | SEQ ID NO: 588 |
| SEQ ID NO: 764 | SEQ ID NO: 774 |
| SEQ ID NO: 765 | SEQ ID NO: 775 |
| SEQ ID NO: 766 | SEQ ID NO: 776 |
| SEQ ID NO: 767 | SEQ ID NO: 777 |

[0030] A nucleic acid comprising first and second strands that comprise, consist of, or consist essentially of a nucleoside sequence differing by 0 or 1 nucleosides from any one of the following first and second sequences:

| Unmodified first strand | Unmodified second strand |
|---|---|
| SEQ ID NO: 145 | SEQ ID NO: 265 |
| SEQ ID NO: 148 | SEQ ID NO: 268 |

[0031] A nucleic acid comprising first and second strands that comprise, consist of, or consist essentially of a nucleoside sequence differing by 0 or 1 nucleosides from any one of the following first and second sequences:

| Modified first strand | Modified second strand |
|---|---|
| SEQ ID NO: 385 | SEQ ID NO: 585 |
| SEQ ID NO: 764 | SEQ ID NO: 774 |
| SEQ ID NO: 765 | SEQ ID NO: 775 |
| SEQ ID NO: 783 | SEQ ID NO: 775 |
| SEQ ID NO: 801 | SEQ ID NO: 819 |
| SEQ ID NO: 802 | SEQ ID NO: 819 |
| SEQ ID NO: 803 | SEQ ID NO: 819 |
| SEQ ID NO: 804 | SEQ ID NO: 819 |
| SEQ ID NO: 805 | SEQ ID NO: 819 |
| SEQ ID NO: 806 | SEQ ID NO: 819 |
| SEQ ID NO: 807 | SEQ ID NO: 819 |
| SEQ ID NO: 808 | SEQ ID NO: 819 |
| SEQ ID NO: 809 | SEQ ID NO: 819 |

[0032] A nucleic acid comprising first and second strands that comprise, consist of, or consist essentially of a nucleoside sequence differing by 0 or 1 nucleosides from any one of the following first and second sequences:

| Modified first strand | Modified second strand |
|---|---|
| SEQ ID NO: 388 | SEQ ID NO: 588 |
| SEQ ID NO: 766 | SEQ ID NO: 776 |
| SEQ ID NO: 767 | SEQ ID NO: 777 |
| SEQ ID NO: 810 | SEQ ID NO: 820 |
| SEQ ID NO: 811 | SEQ ID NO: 820 |
| SEQ ID NO: 812 | SEQ ID NO: 820 |
| SEQ ID NO: 813 | SEQ ID NO: 820 |
| SEQ ID NO: 814 | SEQ ID NO: 820 |
| SEQ ID NO: 815 | SEQ ID NO: 820 |
| SEQ ID NO: 816 | SEQ ID NO: 820 |
| SEQ ID NO: 817 | SEQ ID NO: 820 |
| SEQ ID NO: 818 | SEQ ID NO: 820 |

[0033] A nucleic acid comprising first and second strands that comprise, consist of, or consist essentially of a nucleoside sequence differing by 0 or 1 nucleosides from any one of the following first and second sequences:

| Modified first strand | Modified second strand |
|---|---|
| SEQ ID NO: 764 | SEQ ID NO: 774 |
| SEQ ID NO: 766 | SEQ ID NO: 776 |

[0034] A conjugate for inhibiting expression of ZPI target gene in a cell, said conjugate comprising a nucleic acid as disclosed herein and one or more ligand moieties.

[0035] A pharmaceutical composition comprising a nucleic acid as disclosed herein, in combination with a pharmaceutically acceptable excipient or carrier.

[0036] A nucleic acid or pharmaceutical composition, for use in therapy.

[0037] A nucleic acid or pharmaceutical composition, for use in prevention or treatment of a disease related to a disorder of haemostasis, such as a disease related to a disorder of haemostasis, such as haemophilia.

### BRIEF DESCRIPTION OF THE DRAWINGS

[0038] FIG. 1: Linker and ligand portions of constructs suitable for use according to the present invention including tether 1a. While FIG. 1 depicts the linker to be conjugated to an oligonucleotide, it is to be understood that the present invention also encompasses conjugates of the same linker with an oligonucleoside as disclosed herein.

[0039] It should also be understood that while FIG. 1 depicts as a product molecules based on the linker and ligand portions as specifically depicted in FIG. 1 attached to an oligonucleoside moiety as also depicted herein, this product may alternatively further comprise, or consist essentially of, molecules wherein the linker and ligand portions are essentially as depicted in FIG. 1 attached to an oligonucleoside moiety but having the F substituent as shown in FIG. 1 on the cyclo-octyl ring replaced by a substituent occurring as a result of hydrolytic displacement, such as an OH substituent. In this way, (a) tether 1a constructs can consist essentially of molecules having linker and ligand portions specifically as depicted in FIG. 1, with a F substituent on the cyclo-octyl ring; or (b) tether 1a constructs can consist essentially of molecules having linker and ligand portions essentially as depicted in FIG. 1 but having the F substituent as shown in FIG. 1 on the cyclo-octyl ring replaced by a substituent occurring as a result of hydrolytic displacement, such as an OH substituent, or (c) tether 1a constructs can comprise a mixture of molecules as defined in (a) and/or (b).

[0040] FIG. 2: Linker and ligand portions of constructs suitable for use according to the present invention including tether 1b. While FIG. 2 depicts the linker to be conjugated to an oligonucleotide, it is to be understood that the present invention also encompasses conjugates of the same linker with an oligonucleoside as disclosed herein.

[0041] The comments made in relation to FIG. 1 and the possible replacement of the F substituent as shown in FIG. 1 on the cyclo-octyl ring replaced by a substituent occurring as a result of hydrolytic displacement, such as an OH substituent, apply equally to tether 1b constructs. In this way, (a) tether 1b constructs can consist essentially of molecules having linker and ligand portions specifically as depicted in FIG. 2, with a F substituent on the cyclo-octyl ring: or (b) tether 1b constructs can consist essentially of molecules having linker and ligand portions essentially as depicted in FIG. 2 but having the F substituent as shown in FIG. 2 on the cyclo-octyl ring replaced by a substituent occurring as a result of hydrolytic displacement, such as an OH substituent, or (c) tether 1b constructs can comprise a mixture of molecules as defined in (a) and/or (b).

[0042] FIG. 3: Linker and ligand portions of constructs suitable for use according to the present invention including tether 2a. While FIG. 3 depicts the linker to be conjugated to an oligonucleotide, it is to be understood that the present invention also encompasses conjugates of the same linker with an oligonucleoside as disclosed herein.

[0043] FIG. 4: Linker and ligand portions of constructs suitable for use according to the present invention including tether 2b. While FIG. 4 depicts the linker to be conjugated to an oligonucleotide, it is to be understood that the present invention also encompasses conjugates of the same linker with an oligonucleoside as disclosed herein.

[0044] FIG. 5: Formulae described in Sentences 1-101 disclosed herein.

[0045] FIG. 6: Formulae described in Clauses 1-56 disclosed herein.

[0046] FIG. 7A-7B: Inverted abasic constructs that can be used with nucleic acid sequences according to the present invention as described herein. For FIG. 7A, a galnac linker is attached to the 5′ end region of the sense strand in use (not depicted in FIG. 7A). For FIG. 7B, a galnac linker is attached to the 3′ end region of the sense strand in use (not depicted in FIG. 7B).

[0047] iaia as shown at the 3′ end region of the sense strand in FIG. 7A represents (i) two abasic nucleosides provided as the penultimate and terminal nucleosides at the 3′ end region of the sense strand, (ii) wherein a 3′-3′ reversed linkage is provided between the antepenultimate nucleoside (namely at position 21 of the sense strand, wherein position 1 is the terminal 5′ nucleoside of the sense strand) and the adjacent penultimate abasic residue of the sense strand, and (iii) the linkage between the terminal and penultimate abasic nucleosides is 5′-3′ when reading towards the 3′ end region comprising the terminal and penultimate abasic nucleosides.

[0048] iaia as shown at the 5′ end region of the sense strand in FIG. 7B represents (i) two abasic nucleosides provided as the penultimate and terminal nucleosides at the 5′ end region of the sense strand, (ii) wherein a 5′-5′ reversed linkage is provided between the antepenultimate nucleoside (namely at position 1 of the sense strand, not including the iaia motif at the 5′ end region of the sense strand in the nucleoside position numbering on the sense strand) and the adjacent penultimate abasic residue of the sense strand, and (iii) the linkage between the terminal and penultimate abasic nucleosides is 3′-5′ when reading towards the 5′ end region comprising the terminal and penultimate abasic nucleosides.

[0049] FIG. 8A-8B: Duplex constructs according to Table 5.

[0050] FIG. 9: Results of dose-response experiments for inhibition of ZPI mRNA expression in human Huh7 cells. Points represent mean relative expression of ZPI mRNA compared to untreated wells after treatment with siRNA construct at the indicated concentrations on the x-axis. Error bars represent standard deviation of the mean. Dotted curves represent 95% confidence intervals. Dotted lines and shaded areas represent the mean relative expression +/−standard deviation from untreated wells on the same plate.

[0051] FIG. 10: Change in liver ZPI mRNA expression over time following subcutaneous delivery of GalNAc conjugated siRNAs in C57BL/6 mice. ETXM1180, 1188, and 1192 were all murinised for this assay as described in Example 11. Data are mean+/−standard deviation, n=3 mice per timepoint.

[0052] FIG. 11: Change in liver ZPI mRNA expression over time following subcutaneous delivery of GalNAc conjugated siRNAs in C57BL/6 mice. ETXM1181, 1189 and 1193 were all murinised for this assay as described in Example 11. Data are mean+/−standard deviation, n=3 mice per timepoint.

[0053] FIG. 12A-12B: Visual bleeding score of mice in three different treatment groups (wild type control group. Haem A mice that received a vehicle (0.9% saline), and Haem A mice that received the GalNAc-siRNA construct ETXM1184) 3 days (FIG. 12A) and 10 days (FIG. 12B) post injury. Definition of the bleeding scores is provided below.

[0054] FIG. 13A-13B: FIG. 13A shows a comparison of knee diameters at day 3 and 10 post injury of mice in three different treatment groups (wild-type control group. Haem A mice receiving vehicle (0.9% saline), and Haem A mice receiving the GalNAc-siRNA construct ETXM1184). FIG. 13B shows a comparison of skinned knee diameter at day 10 post injury of mice in the same three treatment groups.

[0055] FIG. 14A-14M: Comparison of the severity of bone marrow hyperplasia (FIG. 14A), osteoarthritis (FIG. 14B), chondrocyte degeneration/necrosis (FIG. 14C), haemorrhage (FIG. 14D), haemosiderin deposition (FIG. 14E), haematoma (FIG. 14F), osteoclastogenic bone resorption (FIG. 14G), osteolysis (FIG. 14H), periostitis (FIG. 14I), sub-chondral bone sclerosis (FIG. 14J), tendon degeneration (FIG. 14K), tendonitis (FIG. 14L) and tenosynovitis (FIG. 14M) in mice in three different treatment groups (wild-type control group, Haem A mice receiving vehicle (0.9% saline), and Haem A mice receiving the GalNAc-siRNA construct ETXM1184).

[0056] FIG. 15: Joint Protection: Several Endpoints Document Dose-Responsive Effect. Prophylactic administration of ETXM1184 shows dose-dependent protection in key tissue readouts at 10 days post-injury. ETXM1184 shows efficacy in the same range as clinical comparators: FVIII replacement therapy as gold-standard for emergency treatments (Advate) and siRNA-based rebalancing agent for prophylaxis that demonstrated good bleed protection in late-stage clinical development (fitusiran). * Scale: ( )=Normal: 1=Minimal: 2=Moderate: 3=Marked: 4=Severe. [1] Glasson et al., Osteoarthritis Cartilage. 2010 October; 18 Suppl 3:S17-23. doi: 10.1016/j.joca.2010.05.025. PMID: 20864019.

[0057] FIG. 16: Composite haemarthrosis histopathology score quantifies: Tendonitis, Tendon degeneration, Tenosynovitis, Periostitis, Osteolysis, Osteoclastic bone resorption, Haemorrhage, Haematoma, Haemosiderin deposition, Chondrocyte necrosis, Cartilage OARSI Grade, Subchondral bone sclerosis and Bone marrow hyperplasia. ETX-148 shows significant dose-responsive effect (Bayesian linear model fitted to composite score). Median reduction of composite score compared to control: −1.25 for the ETXM1184 10 mg/kg group (significance level equivalent to p<0.01): −0.91 for the ETXM1184 3 mg/kg group (significance level equivalent to p<0.05). Comparator fitusiran shows median reduction of −1.04 for the 3 mg/kg group (significance level equivalent to p<0.05).

[0058] FIG. 17: Prophylactic administration of ETXM1184 improves haemarthrosis joint pathology in haemophilia A mice. Administration of 3 mg/kg ETXM1184 resulted in improved hemarthrosis knee joint pathology, reduced inflammation, and resulted in smaller areas of haemorrhage.

[0059] FIG. 18: Prophylactic administration of ETXM1184 reduces post-injury bleeding in hemophilia A mice (in-life visual bleeding score (VBS)). A bleeding event was introduced into the knee joint of Hemophilia A mice 8 days after siRNA administration. Bleeding was monitored for 10 days post-injury and terminal histological analysis was conducted. Prophylactic administration of a single 10 mg/kg dose of ETXM1184 effectively reduced visual bleeding score (VBS) comparably to Factor VIII replacement (Advate) by 10 days post-injury.

[0060] FIG. 19: Prophylactic administration of ETXM1184 reduces post-injury bleeding into the knee joint of hemophilia A mice (in-life measurement of injured knee diameter compared to non-injured knee diameter). A bleeding event was introduced into the knee joint of Hemophilia A mice 8 days after siRNA administration. Bleeding was monitored for 10 days post-injury and terminal histological analysis conducted. Prophylactic ETXM1184 administered as a single 10 mg/kg dose effectively reduced blood accumulation in knee joint comparably to Factor VIII replacement (Advate) by 10 days post-injury.

[0061] FIG. 20: Prophylactic administration of ETXM1184 reduces hemarthrosis in a Hemophilia A mouse model (terminal measurements taken 18 days post-siRNA dosing and 10) days post-injury). Prophylactic ETXM1184 administered as a single 10 mg/kg dose effectively reduced joint bleeding and characteristics of hemophilic arthropathy comparably to Factor VIII replacement (Advate) by 10 days post-injury.

[0062] FIG. 21: Inhibition of ZPI expression by ETXM1184 (ETXS1036 & ETXS1035), ETXM1199 (ETXS2398 & ETXS2397), ETXM1200 (ETXS2400 & ETXS2397), ETXM1201 (ETXS2402 & ETXS2397), ETXM1202 (ETXS2404 & ETCS2397), ETXM1203 (ETXS2406 & ETXS2397), ETXM 1204 (ETXS2408 & ETXS2397), ETXM 1205 (ETXS2410 & ETXS2397), ETXM1206 (ETXS2412 & ETXS2397) and ETXM1207 (ETXS2414 & ETXS2397).

### DEFINITIONS

[0063] The “first strand”, also called the antisense strand or guide strand herein and which can be used interchangeably herein, refers to the nucleic acid strand, e.g. the strand of an siRNA, e.g. a dsiRNA, which includes a region that is substantially complementary to a target sequence, e.g. to an mRNA. As used herein, the term “region of complementarity” refers to the region on the antisense strand that is substantially complementary to a sequence, for example a target sequence. Where the region of complementarity is not fully complementary to the target sequence, the mismatches can typically be in the internal or terminal regions of the molecule. In some embodiments, a double stranded nucleic acid e.g. an siRNA agent of the invention includes a nucleoside mismatch in the antisense strand.

[0064] The “second strand” (also called the sense strand or passenger strand herein, and which can be used interchangeably herein), refers to the strand of a nucleic acid e.g. siRNA that includes a region that is substantially complementary to a region of the antisense strand as that term is defined herein.

[0065] In the context of molecule comprising a nucleic acid provided with a ligand moiety, optionally also with a linker moiety, the nucleic acid of the invention may be referred to as an oligonucleoside or an oligonucleoside moiety.

[0066] Oligonucleotides are short nucleic acid polymers. Whilst oligonucleotides contain phosphodiester bonds between the nucleoside component thereof (base plus sugar), the present invention is not limited to oligonucleotides always joined by such a phosphodiester bond between adjacent nucleosides, and other oligomers of nucleosides joined by bonds which are bonds other than a phosphodiester bond are contemplated. For example, a bond between nucleosides may be a phosphorothioate bond. Therefore, the term “oligonucleoside” as used herein covers both oligonucleotides and other oligomers of nucleosides. An oligonucleoside which is a nucleic acid having at least a portion which is an oligonucleotide is preferred according to the present invention. An oligonucleoside having one or more, or a majority of, phosphodiester backbone bonds between nucleosides is also preferred according to the present invention. An oligonucleoside having one or more, or a majority of, phosphodiester backbone bonds between nucleosides, and also having one or more phosphorothioate backbone bonds between nucleosides (typically in a terminal region of the first and/or second strands) is also preferred according to the present invention.

[0067] It is preferred herein that the nucleic acid according to the invention is a double stranded oligonucleoside comprising one or more phosphorothioate backbone bonds between nucleosides. Accordingly, in all instances in which the present application refers to an oligonucleotide, particularly in the chemical structures disclosed herein, the oligonucleotide may equally be an oligonucleoside as defined herein.

[0068] In some embodiments, a double stranded nucleic acid e.g. siRNA agent of the invention includes a nucleoside mismatch in the sense strand. In some embodiments, the nucleoside mismatch is, for example, within 5, 4, 3, 2, or 1 nucleosides from the 3′-end of the nucleic acid e.g. siRNA.

[0069] In another embodiment, the nucleoside mismatch is, for example, in the 3′-terminal nucleoside of the nucleic acid e.g. siRNA.

[0070] A “target sequence” (which may also be called a target RNA or a target mRNA) refers to a contiguous portion of the nucleoside sequence of an mRNA molecule formed during the transcription of a gene, including mRNA that is a product of RNA processing of a primary transcription product.

[0071] The target sequence may be from about 10-35 nucleosides in length, e.g., about 15-30 nucleosides in length. For example, the target sequence can be from about 15-30 nucleosides, 15-29, 15-28, 15-27, 15-26, 15-25, 15-24, 15-23, 15-22, 15-21, 15-20, 15-19, 15-18, 15-17, 18-30, 18-29, 18-28, 18-27, 18-26, 18-25, 18-24, 18-23, 18-22, 18-21, 18-20, 19-30, 19-29, 19-28, 19-27, 19-26, 19-25, 19-24, 19-23, 19-22, 19-21, 19-20, 20-30, 20-29, 20-28, 20-27, 20-26, 20-25, 20-24, 20-23, 20-22, 20-21, 21-30, 21-29, 21-28, 21-27, 21-26, 21-25, 21-24, 21-23, or 21-22 nucleosides in length. Ranges and lengths intermediate to the above recited ranges and lengths are also contemplated to be part of the invention.

[0072] The term “ribonucleoside” or “nucleoside” can also refer to a modified nucleoside, as further detailed below.

[0073] A nucleic acid can be a DNA or an RNA, and can comprise modified nucleosides. RNA is a preferred nucleic acid.

[0074] The terms “iRNA”, “siRNA”, “RNAi agent,” and “iRNA agent,” “RNA interference agent” as used interchangeably herein, refer to an agent that contains RNA, and which mediates the targeted cleavage of an RNA transcript via an RNA-induced silencing complex (RISC) pathway. siRNA directs the sequence-specific degradation of mRNA through RNA interference (RNAi).

[0075] A double stranded RNA is referred to herein as a “double stranded siRNA (dsiRNA) agent”, “double stranded siRNA (dsiRNA) molecule”, “double stranded RNA (dsRNA) agent”, “double stranded RNA (dsRNA) molecule”, “dsiRNA agent”, “dsiRNA molecule”, or “dsiRNA”, which refers to a complex of ribonucleic acid molecules, having a duplex structure comprising two anti-parallel and substantially complementary nucleic acid strands, referred to as having “sense” and “antisense” orientations with respect to a target RNA.

[0076] The majority of nucleosides of each strand of the nucleic acid, e.g. a dsiRNA molecule, are preferably ribonucleosides, but in that case each or both strands can also include one or more non-ribonucleosides, e.g., a deoxyribonucleoside or a modified nucleoside. In addition, as used in this specification, an “siRNA” may include ribonucleosides with chemical modifications.

[0077] The term “modified nucleoside” refers to a nucleoside having, independently, a modified sugar moiety, a modified internucleoside linkage, or modified nucleobase, or any combination thereof. Thus, the term modified nucleoside encompasses substitutions, additions or removal of, e.g., a functional group or atom, to internucleoside linkages, sugar moieties, or nucleobases. Any such modifications, as used in an siRNA type molecule, are encompassed by “iRNA” or “RNAi agent” or “siRNA” or “siRNA agent” for the purposes of this specification and claims.

[0078] The two strands forming the duplex structure may be different portions of one larger molecule, or they may be separate molecules e.g. RNA molecules.

[0079] The term “nucleoside overhang” refers to at least one unpaired nucleoside that extends from the duplex structure of a nucleic acid according to the present invention. A nucleic acid according to the present invention can comprise an overhang of at least one nucleoside; alternatively the overhang can comprise at least two nucleosides, at least three nucleosides, at least four nucleosides, at least five nucleosides or more. A nucleoside overhang can comprise or consist of a nucleoside/nucleoside analog, including a deoxynucleoside. The overhang(s) can be on the sense strand, the antisense strand, or any combination thereof. Furthermore, the nucleoside(s) of an overhang can be present on the 5′-end, 3′-end, or both ends of either an antisense or sense strand.

[0080] In certain embodiments, the antisense strand has a 1-10 nucleoside, e.g., 0-3, 1-3, 2-4, 2-5, 4-10, 5-10, 1, 2, 3, 4, 5, 6, 7, 8, 9, or 10 nucleoside, overhang at the 3′-end or the 5′-end.

[0081] “Blunt” or “blunt end” means that there are no unpaired nucleosides at that end of the double stranded nucleic acid, i.e., no nucleoside overhang. The nucleic acids of the invention include those with no nucleoside overhang at one end or with no nucleoside overhangs at either end.

[0082] Unless otherwise indicated, the term “complementary,” when used to describe a first nucleoside sequence in relation to a second nucleoside sequence, refers to the ability of an oligonucleoside comprising the first nucleoside sequence to hybridize and form a duplex structure under certain conditions with an oligonucleoside comprising the second nucleoside sequence, as will be understood by the skilled person. Such conditions can, for example, be stringent conditions, where stringent conditions can include: 400 mM NaCl, 40 mM PIPES pH 6.4, 1 mM EDTA, 50° C. or 70° C. for 12-16 hours followed by washing (see, e.g., “Molecular Cloning: A Laboratory Manual, Sambrook, et al. (1989) Cold Spring Harbor Laboratory Press).

[0083] Complementary sequences within nucleic acid e.g. a dsiRNA, as described herein, include base-pairing of the oligonucleoside comprising a first nucleoside sequence to an oligonucleoside comprising a second nucleoside sequence over the entire length of one or both nucleoside sequences. Such sequences can be referred to as “fully complementary” with respect to each other herein. However, where a first sequence is referred to as “substantially complementary” or “partially complementary.” with respect to a second sequence herein, the two sequences can be fully complementary, or they can form one or more mismatched base pairs, such as 2, 4, or 5 mismatched base pairs, but preferably not more than 5, while retaining the ability to hybridize under the conditions most relevant to their ultimate application, e.g., inhibition of gene expression via a RISC pathway. Overhangs shall not be regarded as mismatches with regard to the determination of complementarity. For example, a nucleic acid e.g. dsiRNA comprising one oligonucleoside 17 nucleosides in length and another oligonucleoside 19 nucleosides in length, wherein the longer oligonucleoside comprises a sequence of 17 nucleosides that is fully complementary to the shorter oligonucleoside, can yet be referred to as “fully complementary”.

[0084] “Complementary” sequences, as used herein, can also include, or be formed entirely from, non-Watson-Crick base pairs or base pairs formed from non-natural and modified nucleosides, in so far as the above requirements with respect to their ability to hybridize are fulfilled. Such non-Watson-Crick base pairs include, but are not limited to, G: U Wobble or Hoogstein base pairing.

[0085] The terms “complementary,” “fully complementary” and “substantially/partially complementary” herein can be used with respect to the base matching between the sense strand and the antisense strand of a nucleic acid eg dsiRNA, or between the antisense strand of a double stranded nucleic acid e.g. siRNA agent and a target sequence.

[0086] Within the present invention, the second strand of the nucleic acid according to the invention, in particular a dsiRNA for inhibiting ZPI, is at least partially complementary to the first strand of said nucleic acid. In certain embodiments, a first and second strand of a nucleic acid according to the invention are partially complementary if they form a duplex region having a length of at least 17 base pairs and comprising not more than 1, 2, 3, 4, or 5 mismatched base pairs.

[0087] In certain embodiments, a first and second strand of the nucleic acid according to the invention are partially complementary if they form a duplex region having a length of 19 base pairs and comprising not more than 1, 2, 3, 4, or 5 mismatched base pairs. In certain embodiments, a first and second strand of the nucleic acid according to the invention are partially complementary if they form a duplex region having a length of 21 base pairs comprising not more than 1, 2, 3, 4, or 5 mismatched base pairs.

[0088] Alternatively, a first and second strand of the nucleic acid according to the invention are partially complementary if they form a duplex region having a length of at least 17 base pairs, wherein at least 14, 15, 16 or 17 of said base pairs are complementary base pairs, in particular Watson-Crick base pairs.

[0089] In certain embodiments, a first and second strand of the nucleic acid according to the invention are partially complementary if they form a duplex region having a length of 19 base pairs, wherein at least 14, 15, 16, 17, 18 or all 19 base pairs are complementary base pairs, in particular Watson-Crick base pairs. In certain embodiments, a first and second strand of the nucleic acid according to the invention are partially complementary if they form a duplex region having a length of 21 base pairs, wherein at least 16, 17, 18, 19, 20 or all 21 base pairs are complementary base pairs, in particular Watson-Crick base pairs.

[0090] As used herein, a nucleic acid that is “substantially complementary” or “partially complementary” to at least part of a messenger RNA (mRNA) refers to a nucleic acid that is substantially or partially complementary to a contiguous portion of the mRNA of interest (e.g., an mRNA encoding a gene). In certain embodiments, the contiguous portion of the mRNA is a sequence as listed in Table 1, i.e., any one of SEQ ID NOs: 2-121. For example, a nucleic acid is complementary to at least a part of an mRNA of a gene of interest if the sequence is substantially or partially complementary to a non-interrupted portion of an mRNA encoding that gene.

[0091] Accordingly, in some preferred embodiments, the antisense oligonucleosides as disclosed herein are fully complementary to the target gene sequence.

[0092] In other embodiments, the antisense oligonucleosides disclosed herein are substantially or partially complementary to a target RNA sequence and comprise a contiguous nucleoside sequence which is at least about 80% complementary over its entire length to the equivalent region of the target RNA sequence, such as at least about 85%, 86%, 87%, 88%, 89%, about 90%, 91%, 92%, 93%, 94%, 95%, 96%, 97%, 98%, or 99% complementary or 100% complementary.

[0093] In certain embodiments, the first (antisense) strand of a nucleic acid according to the invention is partially or fully complementary to a contiguous portion of RNA transcribed from the ZPI gene. In certain embodiments, the first strand of the nucleic acid according to the invention is partially or fully complementary to a contiguous portion of at least 17 nucleosides of the ZPI mRNA. In certain embodiments, the first strand of the nucleic acid according to the invention is partially or fully complementary to a contiguous portion of 17, 18, 19, 20, 21, 22 or 23 nucleosides of the ZPI mRNA. In certain embodiments, the first strand of the nucleic acid according to the invention is partially or fully complementary to a contiguous portion of 17, 18, 19, 20, 21, 22 or 23 nucleosides of any one of the sequences as listed in Table 1, i.e., any one of SEQ ID NOs: 2-121.

[0094] In certain embodiments, the first (antisense) strand of the nucleic acid according to the invention is partially complementary to a contiguous portion of the ZPI mRNA if it comprises a contiguous nucleoside sequence of at least 17 nucleosides, wherein at least 14, 15, 16 or 17 nucleosides of said contiguous nucleoside sequence are complementary to a contiguous portion of the ZPI mRNA. In certain embodiments, the first strand of the nucleic acid according to the invention comprises a contiguous nucleoside sequence of at least 17 nucleosides, wherein at least 14, 15, 16 or 17 nucleosides of said contiguous nucleoside sequence are complementary to a contiguous portion of any one of the sequences listed in Table 1, i.e., any one of SEQ ID NOs: 2-121. In certain embodiments, the first strand of the nucleic acid according to the invention comprises a contiguous nucleoside sequence of 19 nucleosides, wherein at least 14, 15, 16, 17, 18 or all 19 nucleosides of said contiguous nucleoside sequence are complementary to a contiguous portion of any one of the sequences listed in Table 1, i.e., any one of SEQ ID NOs: 2-121. In certain embodiments, the first strand of the nucleic acid according to the invention comprises a contiguous nucleoside sequence of 23 nucleosides, wherein at least 18, 19, 20, 21, 22 or all 23 nucleosides of said contiguous nucleoside sequence are complementary to a contiguous portion of any one of the sequences listed in Table 1, i.e., any one of SEQ ID NOs: 2-101.

[0095] In some embodiments, a nucleic acid e.g. an siRNA of the invention includes a sense strand that is substantially or partially complementary to an antisense oligonucleoside which, in turn, is complementary to a target gene sequence and comprises a contiguous nucleoside sequence. The nucleoside sequence of the sense strand is typically at least about 80% complementary over its entire length to the equivalent region of the nucleoside sequence of the antisense strand, such as about 85%, 86%, 87%, 88%, 89%, 90%, 91%, 92%, 93%, 94%, 95%, 96%, 97%, 98%, or 99% complementary, or 100% complementary.

[0096] In some embodiments, a nucleic acid e.g. an siRNA of the invention includes an antisense strand that is substantially or partially complementary to the target sequence and comprises a contiguous nucleoside sequence which is at least 80% complementary over its entire length to the target sequence such as about 85%, 86%, 87%, 88%, 89%, 90%, 91%, 92%, 93%, 94%, 95%, 96%, 97%, 98%, or 99% complementary, or 100% complementary.

[0097] As used herein, a “subject” is an animal, such as a mammal, including a primate (such as a human, a non-human primate, e.g., a monkey, and a chimpanzee), or a non-primate or a bird that expresses the target gene, either endogenously or heterologously, when the target gene sequence has sufficient complementarity to the nucleic acid e.g. siRNA agent to promote target knockdown. In certain preferred embodiments, the subject is a human.

[0098] The terms “treating” or “treatment” refer to a beneficial or desired result including, but not limited to, alleviation or amelioration of one or more symptoms associated with gene expression. “Treatment” can also mean prolonging survival as compared to expected survival in the absence of treatment. Treatment can include prevention of development of co-morbidities, e.g., reduced liver damage in a subject with a hepatic infection.

[0099] “Therapeutically effective amount,” as used herein, is intended to include the amount of a nucleic acid e.g. an siRNA that, when administered to a patient for treating a subject having disease, is sufficient to effect treatment of the disease (e.g., by diminishing, ameliorating or maintaining the existing disease or one or more symptoms of disease or its related comorbidities).

[0100] The phrase “pharmaceutically acceptable” is employed herein to refer to compounds, materials, compositions, or dosage forms which are suitable for use in contact with the tissues of human subjects and animal subjects without excessive toxicity, irritation, allergic response, or other problem or complication, commensurate with a reasonable benefit/risk ratio.

[0101] The phrase “pharmaceutically-acceptable carrier” as used herein means a pharmaceutically-acceptable material, composition, or vehicle, such as a liquid or solid filler, diluent, excipient, manufacturing aid or solvent encapsulating material, involved in carrying or transporting the subject compound from one organ, or portion of the body, to another organ, or portion of the body. Each carrier must be “acceptable” in the sense of being compatible with the other ingredients of the formulation and not injurious to the subject being treated.

[0102] Where a value or range of values of a parameter are recited, it is intended that values and ranges intermediate to the recited values are also intended to be part of this invention.

[0103] The articles “a” and “an” are used herein to refer to one or to more than one (i.e. to at least one) of the grammatical object of the article.

[0104] The term “including” is used herein to mean, and is used interchangeably with, the phrase “including but not limited to”.

[0105] The term “or” is used herein to mean, and is used interchangeably with, the term “and/or,” unless context clearly indicates otherwise. For example, “sense strand or antisense strand” is understood as “sense strand or antisense strand or sense strand and antisense strand.”

[0106] The term “about” is used herein to mean within the typical ranges of tolerances in the art. For example, “about” can be understood as about 2 standard deviations from the mean. In certain embodiments, about means +10%. In certain embodiments, about means +5%. When about is present before a series of numbers or a range, it is understood that “about” can modify each of the numbers in the series or range.

[0107] The term “at least” prior to a number or series of numbers is understood to include the number adjacent to the term “at least”, and all subsequent numbers or integers that could logically be included, as clear from context. For example, the number of nucleosides in a nucleic acid molecule must be an integer. For example, “at least 18 nucleosides of a 21 nucleoside nucleic acid molecule” means that 18, 19, 20, or 21 nucleosides have the indicated property. When at least is present before a series of numbers or a range, it is understood that “at least” can modify each of the numbers in the series or range.

[0108] As used herein, “no more than” or “less than” is understood as the value adjacent to the phrase and logical lower values or integers, as logical from context, to zero. For example, a duplex with an overhang of “no more than 2 nucleosides” has a 2, 1, or 0 nucleoside overhang. When “no more than” is present before a series of numbers or a range, it is understood that “no more than” can modify each of the numbers in the series or range.

[0109] The terminal region of a strand is the last 5 nucleosides from the 5′ or the 3′ end.

[0110] Various embodiments of the invention can be combined as determined appropriate by one of skill in the art.

### Abasic Nucleosides

[0111] In certain embodiments, there are 1, e.g. 2, e.g. 3, e.g. 4 or more abasic nucleosides present in nucleic acids according to the present invention. Abasic nucleosides are modified nucleosides because they lack the base normally seen at position 1 of the sugar moiety. Typically, there will be a hydrogen at position 1 of the sugar moiety of the abasic nucleosides present in a nucleic acid according to the present invention.

[0112] The abasic nucleosides are in the terminal region of the second strand, preferably located within the terminal 5 nucleosides of the end of the strand. The terminal region may be the terminal 5 nucleosides, which includes abasic nucleosides.

[0113] The second strand may comprise, as preferred features (which are all specifically contemplated in combination unless mutually exclusive):
[0114] 2, or more than 2, abasic nucleosides in a terminal region of the second strand; and/or
[0115] 2, or more than 2, abasic nucleosides in either the 5′ or 3′ terminal region of the second strand; and/or
[0116] 2, or more than 2, abasic nucleosides in either the 5′ or 3′ terminal region of the second strand, wherein the abasic nucleosides are present in an overhang as herein described; and/or
[0117] 2, or more than 2, consecutive abasic nucleosides in a terminal region of the second strand, wherein preferably one such abasic nucleoside is a terminal nucleoside; and/or
[0118] 2, or more than 2, consecutive abasic nucleosides in either the 5′ or 3′ terminal region of the second strand, wherein preferably one such abasic nucleoside is a terminal nucleoside in either the 5′ or 3′ terminal region of the second strand; and/or
[0119] a reversed internucleoside linkage connects at least one abasic nucleoside to an adjacent basic nucleoside in a terminal region of the second strand; and/or
[0120] a reversed internucleoside linkage connects at least one abasic nucleoside to an adjacent basic nucleoside in either the 5′ or 3′ terminal region of the second strand; and/or
[0121] an abasic nucleoside as the penultimate nucleoside which is connected via the reversed linkage to the nucleoside which is not the terminal nucleoside (called the antepenultimate nucleoside herein); and/or
[0122] abasic nucleosides as the 2 terminal nucleosides connected via a 5′-3′ linkage when reading the strand in the direction towards the terminus comprising the terminal nucleosides;
[0123] abasic nucleosides as the 2 terminal nucleosides connected via a 3′-5′ linkage when reading the strand in the direction towards the terminus comprising the terminal nucleosides;
[0124] abasic nucleosides as the terminal 2 positions, wherein the penultimate nucleoside is connected via the reversed linkage to the antepenultimate nucleoside, and wherein the reversed linkage is a 5-5′ reversed linkage or a 3′-3′ reversed linkage;
[0125] abasic nucleosides as the terminal 2 positions, wherein the penultimate nucleoside is connected via the reversed linkage to the antepenultimate nucleoside, and wherein either
[0126] (1) the reversed linkage is a 5-5′ reversed linkage and the linkage between the terminal and penultimate abasic nucleosides is 3′5′ when reading towards the terminus comprising the terminal and penultimate abasic nucleosides: or
[0127] (2) the reversed linkage is a 3-3′ reversed linkage and the linkage between the terminal and penultimate abasic nucleosides is 5′3′ when reading towards the terminus comprising the terminal and penultimate abasic nucleosides.

[0128] Preferably there is an abasic nucleoside at the terminus of the second strand.

[0129] Preferably there are 2 or at least 2 abasic nucleosides in the terminal region of the second strand, preferably at the terminal and penultimate positions.

[0130] Preferably 2 or more abasic nucleosides are consecutive, for example all abasic nucleosides may be consecutive. For example, the terminal 1 or terminal 2 or terminal 3 or terminal 4 nucleosides may be abasic nucleosides.

[0131] An abasic nucleoside may also be linked to an adjacent nucleoside through a 5′-3′ phosphodiester linkage or reversed linkage unless there is only 1 abasic nucleoside at the terminus, in which case it will have a reversed linkage to the adjacent nucleoside.

[0132] A reversed linkage (which may also be referred to as an inverted linkage, which is also seen in the art), comprises either a 5′-5′, a 3′3′, a 3′-2′ or a 2′-3′ phosphodiester linkage between the adjacent sugar moieties of the nucleosides.

[0133] Abasic nucleosides which are not terminal will have 2 phosphodiester bonds, one with each adjacent nucleoside, and these may be a reversed linkage or may be a 5′-3 phosphodiester bond or may be one of each.

[0134] A preferred embodiment comprises 2 abasic nucleosides at the terminal and penultimate positions of the second strand, and wherein the reversed internucleoside linkage is located between the penultimate (abasic) nucleoside and the antepenultimate nucleoside.

[0135] Preferably there are 2 abasic nucleosides at the terminal and penultimate positions of the second strand and the penultimate nucleoside is linked to the antepenultimate nucleoside through a reversed internucleoside linkage and is linked to the terminal nucleoside through a 5′-3′ or 3′-5′ phosphodiester linkage (reading in the direction of the terminus of the molecule).

[0136] Preferably a nucleic acid according to the present invention comprises one or more abasic nucleosides, optionally wherein the one or more abasic nucleosides are in a terminal region of the second strand, and/or wherein at least one abasic nucleoside is linked to an adjacent basic nucleoside through a reversed internucleoside linkage.

[0137] Typically the second strand comprises 2 consecutive abasic nucleosides in the 5′ terminal region of the second strand, wherein one such abasic nucleoside is a terminal nucleoside at the 5′ terminal region of the second strand and the other abasic nucleoside is a penultimate nucleoside at the 5′ terminal region of the second strand, wherein: (a) said penultimate abasic nucleoside is connected to an adjacent first basic nucleoside in an adjacent 5′ near terminal region through a reversed internucleoside linkage; and (b) the reversed linkage is a 5-5′ reversed linkage; and (c) the linkage between the terminal and penultimate abasic nucleosides is 3′5′ when reading towards the terminus comprising the terminal and penultimate abasic nucleosides. More typically, (i) the first strand and the second strand each has a length of 23 nucleosides: (ii) two phosphorothioate internucleoside linkages are respectively between three consecutive positions in said 5′ near terminal region of the second strand, wherein a first phosphorothioate internucleoside linkage is present between said adjacent first basic nucleoside of (a) and an adjacent second basic nucleoside in said 5′ near terminal region of the second strand, and a second phosphorothioate internucleoside linkage is present between said adjacent second basic nucleoside and an adjacent third basic nucleoside in said 5′ near terminal region of the second strand: (iii) two phosphorothioate internucleoside linkages are respectively between three consecutive positions in both 5′ and 3′ terminal regions of the first strand. whereby a terminal nucleoside respectively at each of the 5′ and 3′ terminal regions of said first strand is each attached to a respective 5′ and 3′ adjacent penultimate nucleoside by a phosphorothioate internucleoside linkage, and each first 5′ and 3′ penultimate nucleoside is attached to a respective 5′ and 3′ adjacent antepenultimate nucleoside by a phosphorothioate internucleoside linkage; and (iv) the second strand of the nucleic acid is conjugated directly or indirectly to one or more ligand moieties at the 3′ terminal region of the second strand.

[0138] Alternatively the second strand comprises 2 consecutive abasic nucleosides preferably in an overhang in the 3′ terminal region of the second strand, wherein one such abasic nucleoside is a terminal nucleoside at the 3′ terminal region of the second strand and the other abasic nucleoside is a penultimate nucleoside at the 3′ terminal region of the second strand, wherein: (a) said penultimate abasic nucleoside is connected to an adjacent first basic nucleoside in an adjacent 3′ near terminal region through a reversed internucleoside linkage; and (b) the reversed linkage is a 3-3′ reversed linkage; and (c) the linkage between the terminal and penultimate abasic nucleosides is 5′-3′ when reading towards the terminus comprising the terminal and penultimate abasic nucleosides. More typically. (i) the first strand and the second strand each has a length of 23 nucleosides: (ii) two phosphorothioate internucleoside linkages are respectively between three consecutive positions in said 3′ near terminal region of the second strand, wherein a first phosphorothioate internucleoside linkage is present between said adjacent first basic nucleoside of (a) and an adjacent second basic nucleoside in said 3′ near terminal region of the second strand, and a second phosphorothioate internucleoside linkage is present between said adjacent second basic nucleoside and an adjacent third basic nucleoside in said 3′ near terminal region of the second strand: (iii) two phosphorothioate internucleoside linkages are respectively between three consecutive positions in both 5′ and 3′ terminal regions of the first strand, whereby a terminal nucleoside respectively at each of the 5′ and 3′ terminal regions of said first strand is each attached to a respective 5′ and 3′ adjacent penultimate nucleoside by a phosphorothioate internucleoside linkage, and each first 5′ and 3′ penultimate nucleoside is attached to a respective 5′ and 3′ adjacent antepenultimate nucleoside by a phosphorothioate internucleoside linkage; and (iv) the second strand of the nucleic acid is conjugated directly or indirectly to one or more ligand moieties at the 5′ terminal region of the second strand.

[0139] Examples of the structures are as follows (where the specific RNA nucleosides shown are not limiting and could be any RNA nucleoside):
[0140] A A 3′-3′ reversed bond (and also showing the 5′-3 direction of the last phosphodiester bond between the two abasic molecules reading towards the terminus of the molecule)

[chemical structure]

[0141] B Illustrating a 5′-5′ reversed bond (and also showing the 3′-5′ direction of the last phosphodiester bond between the two abasic molecules reading towards the terminus of the molecule)

[chemical structure]

[symbol]

[0143] The abasic nucleoside or abasic nucleosides present in the nucleic acid are provided in the presence of a reversed internucleoside linkage or linkages, namely a 5′-5′ or a 3′-3′ reversed internucleoside linkage. A reversed linkage occurs as a result of a change of orientation of an adjacent nucleoside sugar, such that the sugar will have a 3′-5′ orientation as opposed to the conventional 5′-3′ orientation (with reference to the numbering of ring atoms on the nucleoside sugars). The abasic nucleoside or nucleosides as present in the nucleic acids of the invention preferably include such inverted nucleoside sugars.

[0144] In the case of a terminal nucleoside having an inverted orientation, then this will result in an “inverted” end configuration for the overall nucleic acid. Whilst certain structures drawn and referenced herein are represented using conventional 5′-3′ direction (with reference to the numbering of ring atoms on the nucleoside sugars), it will be appreciated that the presence of a terminal nucleoside having a change of orientation and a proximal 3′-3′ reversed linkage, will result in a nucleic acid having an overall 5′-5′ end structure (i.e. the conventional 3′ end nucleoside becomes a 5′ end nucleoside). Alternatively, it will be appreciated that the presence of a terminal nucleoside having a change of orientation and a proximal 5′-5′ reversed linkage will result in a nucleic acid with an overall 3′-3′ end structure.

[0145] The proximal 3′-3′ or 5′-5′ reversed linkage as herein described, may comprise the reversed linkage being directly adjacent/attached to a terminal nucleoside having an inverted orientation, such as a single terminal nucleoside having an inverted orientation. Alternatively, the proximal 3′-3′ or 5′-5′ reversed linkage as herein described, may comprise the reversed linkage being adjacent 2, or more than 2, nucleosides having an inverted orientation, such as 2, or more than 2, terminal region nucleosides having an inverted orientation, such as the terminal and penultimate nucleosides. In this way, the reversed linkage may be attached to a penultimate nucleoside having an inverted orientation. While a skilled addressee will appreciate that inverted orientations as described above can result in nucleic acid molecules having overall 3′-3′ or 5′-5′ end structures as described herein, it will also be appreciated that with the presence of one or more additional reversed linkages and/or nucleosides having an inverted orientation, then the overall nucleic acid may have 3′-5′ end structures corresponding to the conventionally positioned 5′/3′ ends.

[0146] In one aspect the nucleic acid may have a 3′-3′ reversed linkage, and the terminal sugar moiety may comprise a 5′ OH rather than a 5′ phosphate group at the 5′ position of that terminal sugar.

[0147] A skilled person would therefore clearly understand that 5′-5′, 3′-3′ and 3′-5′ (reading in the direction of that terminus) end variants of the more conventional 5′-3′ structures (with reference to the numbering of ring atoms on the end nucleoside sugars) drawn herein are included in the scope of the disclosure, where a reversed linkage or linkages is/are present.

[0148] In the situation of, e.g., a reversed internucleoside linkage and/or one or more nucleosides having an inverted orientation creating an inverted end, and where the relative position of a linkage (e.g., to a linker) or the location of an internal feature (such as a modified nucleoside) is defined relative to the 5′ or 3′ end of the nucleic acid, then the 5′ or 3′ end is the conventional 5′ or 3′ end which would have existed had a reversed linkage not been in place, and wherein the conventional 5′ or 3′ end is determined by consideration of the directionality of the majority of the internal nucleoside linkages and/or nucleoside orientation within the nucleic acid. It is possible to tell from these internal bonds and/or nucleoside orientation which ends of the nucleic acid would constitute the conventional 5′ and 3′ ends (with reference to the numbering of ring atoms on the end nucleoside sugars) of the molecule absent the reversed linkage.

[0149] For example, in the structure shown below there are abasic residues in the first 2 positions located at the 5′ end. Where the terminal nucleoside has an inverted orientation then the 5′ end indicated in the diagram below, which is the conventional 5′ end, can in fact comprise a 3′ OH in view of the inverted nucleoside at the terminal position. Nevertheless the majority of the molecule will comprise conventional internucleoside linkages that run from the 3′ OH of the sugar to the 5′ phosphate of the next sugar, when reading in the standard 5′ [PO4] to 3′ [OH] direction of a nucleic acid molecule (with reference to the numbering of ring atoms on the nucleoside sugars), which can be used to determine the conventional 5′ and 3′ ends that would be found absent the inverted end configuration.

### 5′ A-A-Me-Me-Me-Me-Me-Me-F-Me-F—F—F-Me-Me-Me-Me-Me-Me-Me-Me-Me-Me 3′

[0150] In some embodiments, the second (sense) strand of the nucleic acid according to the invention comprises 2 consecutive abasic nucleosides in the 5′ terminal region as shown in the following 5′ terminal motif:

[chemical structure]

[0151] wherein:
[0152] B represents a nucleoside base,
[0153] T represent H, OH or a 2′ ribose modification,
[0154] Z represents the remaining nucleosides of said second strand.

[0155] In some embodiments, the second (sense) strand of the nucleic acid according to the invention comprises 2 consecutive abasic nucleosides in the 5′ terminal region as shown in the following 5′ terminal motif:

[chemical structure]

[0156] wherein:
[0157] B represents a nucleoside base,
[0158] T represents H, OH or a 2′ ribose modification (preferably a 2′ ribose modification, more
[0159] preferably a 2′Me or 2′F ribose modification),
[0160] V represents O or S (preferably O),
[0161] R represents H or C1-4 alkyl (preferably H),
[0162] Z represents the remaining nucleosides of said second strand,
[0163] more preferably the following 5′ terminal motif:

[chemical structure]

[0164] [symbol] [0165] wherein:
[0166] B represents a nucleoside base,
[0167] T represents a 2′ ribose modification (preferably a 2′Me or 2′F ribose modification),
[0168] Z represents the remaining nucleosides of said second strand.

[0169] The reversed bond is preferably located at the end of the nucleic acid eg RNA which is distal to a ligand moiety, such as a GalNAc containing portion, of the molecule.

[0170] GalNAc-siRNA constructs with a 5′-GalNAc on the sense strand can have a reversed linkage on the opposite end of the sense strand.

[0171] GalNAc-siRNA constructs with a 3′-GalNAc on the sense strand can have a reversed linkage on the opposite end of the sense strand.

[0172] In a preferred embodiment, the second (sense) strand of the nucleic acid according to the invention comprises 2 consecutive abasic nucleosides in the 5′ terminal region as shown in the following 5′ terminal motif:

[chemical structure]

[0173] [symbol] [0174] wherein:
[0175] B represents a nucleoside base,
[0176] T represent H, OH or a 2′ ribose modification (preferably a 2′ ribose modification, more preferably a 2′Me or 2′F ribose modification),
[0177] V represent O or S (preferably O),
[0178] R represent H or C1-4 alkyl (preferably H),
[0179] Z comprises 11 to 26 contiguous nucleosides, preferably 15 to 21 contiguous nucleosides, and more preferably 19 contiguous nucleosides,
[0180] more preferably the following 5′ terminal motif:

[chemical structure]

[0181] [symbol] [0182] wherein:
[0183] B represents a nucleoside base,
[0184] T represents a 2′ ribose modification (preferably a 2′Me or 2′F ribose modification).
[0185] Z comprises 19 contiguous nucleosides.

### Nucleic Acid Lengths

[0186] In one aspect the i) the first strand of the nucleic acid has a length in the range of 17 to 30 nucleosides, preferably 19 to 25 nucleosides, more preferably 19 or 23 nucleosides; and/or ii) the second strand of the nucleic acid has a length in the range of 17 to 30 nucleosides, preferably 19 to 25 nucleosides, more preferably 19 or 21 nucleosides.

[0187] Typically the duplex region of the nucleic acid is between 17 and 30 nucleosides in length, more preferably is 19 or 21 nucleosides in length. Similarly, the region of complementarity between the first strand and the portion of RNA transcribed from the ZPI gene is between 17 and 30 nucleosides in length.

### Nucleic Acid Modifications

[0188] In certain embodiments, the nucleic acid e.g. an RNA of the invention e.g., a dsiRNA, does not comprise further modifications, e.g., chemical modifications or conjugations known in the art and described herein.

[0189] In other preferred embodiments, the nucleic acid e.g. RNA of the invention, e.g., a dsiRNA, is further chemically modified to enhance stability or other beneficial characteristics.

[0190] In certain embodiments of the invention, substantially all of the nucleosides are modified.

[0191] The nucleic acids featured in the invention can be synthesized or modified by methods well established in the art, such as those described in “Current protocols in nucleic acid chemistry,” Beaucage, S. L. et al. (Edrs.), John Wiley & Sons, Inc., New York, NY, USA, which is hereby incorporated herein by reference.

[0192] Modifications include, for example, end modifications, e.g., 5′-end modifications (phosphorylation, conjugation, inverted linkages) or 3′-end modifications (conjugation, DNA nucleosides within an RNA, or RNA nucleosides within a DNA, inverted linkages, etc.); base modifications, e.g., replacement with stabilizing bases, destabilizing bases, or bases that base pair with an expanded repertoire of partners, conjugated bases: sugar modifications (e.g., at the 2′-position or 4′-position) or replacement of the sugar: or backbone modifications, including modification or replacement of the phosphodiester linkages.

[0193] Specific examples of nucleic acids such as siRNA compounds useful in the embodiments described herein include, but are not limited to RNAs containing modified backbones or no natural internucleoside linkages. Nucleic acids such as RNAs having modified backbones include, among others, those that do not have a phosphorus atom in the backbone. For the purposes of this specification, and as sometimes referenced in the art, modified nucleic acids e.g. RNAs that do not have a phosphorus atom in their internucleoside backbone can also be considered to be oligonucleosides. In some embodiments, a modified nucleic acid e.g. an siRNA will have a phosphorus atom in its internucleoside backbone.

[0194] Modified nucleic acid e.g. RNA backbones include, for example, phosphorothioates, chiral phosphorothioates, phosphorodithioates, phosphotriesters, aminoalkylphosphotriesters, methyl and other alkyl phosphonates including 3′-alkylene phosphonates and chiral phosphonates, phosphinates, phosphoramidates including 3′-amino phosphoramidate and aminoalkylphosphoramidates, thionophosphoramidates, thionoalkylphosphonates, thionoalkylphosphotriesters, and boranophosphates having normal 3′-5′ linkages, 2′-5′-linked analogs of these, and those having inverted polarity wherein the adjacent pairs of nucleoside units are linked 5′-3′ or 5′-2′. Various salts, mixed salts and free acid forms are also included.

[0195] Modified nucleic acids e.g. RNAs can also contain one or more substituted sugar moieties. The nucleic acids e.g. siRNAs, e.g., dsiRNAs, featured herein can include one of the following at the 2′-position: OH; F; O-, S-, or N-alkyl; O-, S-, or N-alkenyl: O-, S- or N-alkynyl; or O-alkyl-O-alkyl, wherein the alkyl, alkenyl and alkynyl can be substituted or unsubstituted. 2′ O-methyl and 2′-F are preferred modifications.

[0196] In certain preferred embodiments, the nucleic acid comprises at least one modified nucleoside.

[0197] The nucleic acid of the invention may comprise one or more modified nucleosides on the first strand and/or the second strand.

[0198] In some embodiments, substantially all of the nucleosides of the sense strand and all of the nucleosides of the antisense strand comprise a modification.

[0199] In some embodiments, all of the nucleosides of the sense strand and substantially all of the nucleosides of the antisense strand comprise a modification.

[0200] In some embodiments, all of the nucleosides of the sense strand and all of the nucleosides of the antisense strand comprise a modification.

[0201] In one embodiment, at least one of the modified nucleosides is selected from the group consisting of a deoxy-nucleoside, a 3′-terminal deoxy-thymine (dT) nucleoside, a 2′-O-methyl modified nucleoside (also called herein 2′-Me, where Me is a methoxy), a 2′-fluoro modified nucleoside, a 2′-deoxy-modified nucleoside, a locked nucleoside, an unlocked nucleoside, a conformationally restricted nucleoside, a constrained ethyl nucleoside, an abasic nucleoside, a 2′-amino-modified nucleoside, a 2′-O-allyl-modified nucleoside, 2′-O-alkyl-modified nucleoside, 2′-hydroxyl-modified nucleoside, a 2′-methoxyethyl modified nucleoside, a 2′-O-alkyl-modified nucleoside, a morpholino nucleoside, a phosphoramidate, a non-natural base comprising nucleoside, a tetrahydropyran modified nucleoside, a 1,5-anhydrohexitol modified nucleoside, a cyclohexenyl modified nucleoside, a nucleoside comprising a phosphorothioate group, a nucleoside comprising a methylphosphonate group, a nucleoside comprising a 5′-phosphate, and a nucleoside comprising a 5′-phosphate mimic. In another embodiment, the modified nucleosides comprise a short sequence of 3′-terminal deoxy-thymine nucleosides (dT).

[0202] Modifications on the nucleosides may preferably be selected from the group including, but not limited to, LNA, HNA, CeNA, 2′-methoxyethyl, 2′-O-alkyl, 2′-O-allyl, 2′-C-allyl, 2′-fluoro, 2′-deoxy, 2′-hydroxyl, and combinations thereof. In another embodiment, the modifications on the nucleosides are 2-O-methyl (“2′-Me”) or 2′-fluoro modifications.

[0203] One preferred modification is a modification at the 2′-OH group of the ribose sugar, optionally selected from 2′-Me or 2′-F modifications.

[0204] Preferred nucleic acid comprise one or more nucleosides on the first strand and/or the second strand which are modified, to form modified nucleosides, as follows:

[0205] A nucleic acid wherein the modification is a modification at the 2′-OH group of the ribose sugar, optionally selected from 2′-Me or 2′-F modifications.

[0206] A nucleic acid wherein the first strand comprises a 2′-F modification at any of position 2, position 6, position 14, or any combination thereof, counting from position 1 of said first strand.

[0207] A nucleic acid wherein the second strand comprises a 2′-F modification at any of position 7, position 9, position 11, or any combination thereof, counting from position 1 of said second strand.

[0208] A nucleic acid wherein the first and second strand each comprise 2′-Me and 2′-F modifications.

[0209] A nucleic which comprises at least one thermally destabilizing modification, suitably at one or more of positions 1 to 9 of the first strand counting from position 1 of the first strand, and/or at one or more of positions on the second strand aligned with positions 1 to 9 of the first strand, wherein the destabilizing modification is selected from a modified unlocked nucleic acid (UNA) and a glycol nucleic acid (GNA), preferably a glycol nucleic acid, more preferably an (S)-glycol nucleic acid.

[0210] A nucleic acid which comprises at least one thermally destabilizing modification at position 7 of the first strand, counting from position 1 of the first strand.

[0211] A nucleic acid which is an siRNA oligonucleoside, wherein the siRNA oligonucleoside comprises 3 or more 2′-F modifications at positions 6 to 12 of the second strand, such as 4, 5, 6 or 7 2′-F modifications at positions 6 to 12 of the second strand, counting from position 1 of said second strand.

[0212] A nucleic acid which is an siRNA oligonucleoside, wherein said second strand comprises at least 3, such as 4, 5 or 6, 2′-Me modifications at positions 1 to 6 of the second strand, counting from position 1 of said second strand.

[0213] A nucleic acid which is an siRNA oligonucleoside, wherein said first strand comprises at least 5 2′-Me consecutive modifications at the 3′ terminal region, preferably including the terminal nucleoside at the 3′ terminal region, or at least within 1 or 2 nucleosides from the terminal nucleoside at the 3′ terminal region.

[0214] A nucleic acid which is an siRNA oligonucleoside, wherein said first strand comprises 7 2′-Me consecutive modifications at the 3′ terminal region, preferably including the terminal nucleoside at the 3′ terminal region.

[0215] A nucleic acid which is an siRNA oligonucleoside, wherein each of the first and second strands comprises an alternating modification pattern, preferably a fully alternating modification pattern along the entire length of each of the first and second strands, wherein the nucleosides of the first strand are modified by (i) 2′Me modifications on the odd numbered nucleosides counting from position 1 of the first strand, and (ii) 2′F modifications on the even numbered nucleosides counting from position 1 of the first strand, and nucleosides of the second strand are modified by (i) 2′F modifications on the odd numbered nucleosides counting from position 1 of the second strand, and (ii) 2′Me modifications on the even numbered nucleosides counting from position 1 of the second strand. Typically such fully alternating modification patterns are present in a blunt ended oligonucleoside, wherein each of the first and second strands are 19 nucleosides in length.

[0216] Position 1 of the first or the second strand is the nucleoside which is the closest to the end of the nucleic acid (ignoring any abasic nucleosides) and that is joined to an adjacent nucleoside (at Position 2) via a 3′ to 5′ internal bond, with reference to the bonds between the sugar moieties of the backbone, and reading in a direction away from that end of the molecule.

[0217] It can therefore be seen that “position 1 of the sense strand” is the 5′ most nucleoside (not including abasic nucleosides) at the conventional 5′ end of the sense strand. Typically, the nucleoside at this position 1 of the sense strand will be equivalent to the 5′ nucleoside of the selected target nucleic acid sequence, and more generally the sense strand will have equivalent nucleosides to those of the target nucleic acid sequence starting from this position 1 of the sense strand, whilst also allowing for acceptable mismatches between the sequences.

[0218] As used herein, “position 1 of the antisense strand” is the 5′ most nucleoside (not including abasic nucleosides) at the conventional 5′ end of the antisense strand. As hereinbefore described, there will be a region of complementarity between the sense and antisense strands, and in this way the antisense strand will also have a region of complementarity to the target nucleic acid sequence as referred to above.

[0219] In certain embodiments, the nucleic acid e.g. siRNA agent further comprises at least one phosphorothioate or methylphosphonate internucleoside linkage. For example the phosphorothioate or methylphosphonate internucleoside linkage can be at the 3′-terminus or in the terminal region of one strand, i.e., the sense strand or the antisense strand: or at the ends of both strands, the sense strand and the antisense strand.

[0220] In certain embodiments, the phosphorothioate or methylphosphonate internucleoside linkage is at the 5′terminus or in the terminal region of one strand, i.e., the sense strand or the antisense strand: or at the ends of both strands, the sense strand and the antisense strand.

[0221] In certain embodiments, a phosphorothioate or a methylphosphonate internucleoside linkage is at both the 5′- and 3′-terminus or in the terminal region of one strand, i.e., the sense strand or the antisense strand: or at the ends of both strands, the sense strand and the antisense strand.

[0222] Any nucleic acid may comprise one or more phosphorothioate (PS) modifications within the nucleic acid, such as at least two PS internucleoside bonds at the ends of a strand.

[0223] At least one of the oligoribonucleotide strands preferably comprises at least two consecutive phosphorothioate modifications in the last 3 nucleosides of the oligonucleoside.

[0224] The invention therefore also relates to: A nucleic acid disclosed herein which comprises phosphorothioate internucleoside linkages respectively between at least two or three consecutive positions, such as in a 5′ and/or 3′ terminal region and/or near terminal region of the second strand, whereby said near terminal region is preferably adjacent said terminal region wherein said one or more abasic nucleosides of said second strand is/are located.

[0225] A nucleic acid disclosed herein which comprises phosphorothioate internucleoside linkages respectively between at least two or three consecutive positions in a 5′ and/or 3′ terminal region of the first strand, whereby preferably the terminal position at the 5′ and/or 3′ terminal region of said first strand is attached to its adjacent position by a phosphorothioate internucleoside linkage.

[0226] The nucleic acid strand may be an RNA comprising a phosphorothioate internucleoside linkage between the three nucleosides contiguous with 2 terminally located abasic nucleosides.

[0227] A preferred nucleic acid is a double stranded RNA comprising 2 adjacent abasic nucleosides at the 5′ terminus of the second strand and a ligand moiety comprising one or more GalNAc ligand moieties at the opposite 3′ end of the second strand. Further preferred, the same nucleic acid may also comprise a phosphorothioate bond between nucleotides at positions 3-4 and 4-5 of the second strand, reading from the position 1 of the second strand. Further preferred, the same nucleic acid may also comprise a 2′ F modification at positions 7, 9 and 11 of the second strand.

[0228] Preferred modifications are as follows.

[0229] A nucleic acid wherein modified nucleosides of said second strand comprise a modification pattern according to any one of the following (5′-3′):
[0230] Me-Me-Me-Me-Me-Me-F—F—F—F—F-Me-Me-Me-Me-Me-Me-Me-F-Me-Me, or
[0231] Me-Me-Me-Me-Me-F—F-Me-F—F—F—F-Me-Me-Me-Me-Me-Me-Me-Me-Me, or
[0232] Me-Me-Me-Me-Me-Me-F-Me-F—F—F—F-Me-Me-Me-Me-Me-Me-Me-Me-Me, or
[0233] Me-Me-Me-Me-Me-Me-Me-Me-F—F—F-Me-Me-Me-Me-Me-Me-Me-Me-Me-Me, or
[0234] Me-Me-Me-Me-Me-Me-F-Me-F—F—F-Me-Me-Me-Me-Me-Me-Me-Me-Me-Me.

[0235] A nucleic acid wherein modified nucleosides of said second strand comprise a modification pattern according to any one of the following (5′-3′):
[0236] Me(s)Me(s)Me-Me-Me-Me-F—F—F—F—F-Me-Me-Me-Me-Me-Me-Me-F-Me-Me, or
[0237] Me(s)Me(s)Me-Me-Me-F—F-Me-F—F—F—F-Me-Me-Me-Me-Me-Me-Me-Me-Me, or
[0238] Me(s)Me(s)Me-Me-Me-Me-F-Me-F—F—F—F-Me-Me-Me-Me-Me-Me-Me-Me-Me, or
[0239] Me(s)Me(s)Me-Me-Me-Me-Me-Me-F—F—F-Me-Me-Me-Me-Me-Me-Me-Me-Me-Me, or
[0240] Me(s)Me(s)Me-Me-Me-Me-F-Me-F—F—F-Me-Me-Me-Me-Me-Me-Me-Me-Me-Me, or
[0241] Me-Me-Me-Me-Me-Me-F—F—F—F—F-Me-Me-Me-Me-Me-Me-Me-F(s)Me(s)Me, or
[0242] Me-Me-Me-Me-Me-F—F-Me-F—F—F—F-Me-Me-Me-Me-Me-Me-Me(s)Me(s)Me, or
[0243] Me-Me-Me-Me-Me-Me-F-Me-F—F—F—F-Me-Me-Me-Me-Me-Me-Me(s)Me(s)Me, or
[0244] Me-Me-Me-Me-Me-Me-Me-Me-F—F—F-Me-Me-Me-Me-Me-Me-Me-Me(s)Me(s)Me, or
[0245] Me-Me-Me-Me-Me-Me-F-Me-F—F—F-Me-Me-Me-Me-Me-Me-Me-Me(s)Me(s)Me,
[0246] wherein(s) is a phosphorothioate internucleoside linkage.

[0247] A nucleic acid wherein modified nucleosides of said second strand comprise a modification pattern according to any one of the following (5′-3′):
[0248] ia-ia-Me-Me-Me-Me-Me-Me-F—F—F—F—F-Me-Me-Me-Me-Me-Me-Me-F-Me-Me, or
[0249] ia-ia-Me-Me-Me-Me-Me-F—F-Me-F—F—F—F-Me-Me-Me-Me-Me-Me-Me-Me-Me, or
[0250] ia-ia-Me-Me-Me-Me-Me-Me-F-Me-F—F—F—F-Me-Me-Me-Me-Me-Me-Me-Me-Me, or
[0251] ia-ia-Me-Me-Me-Me-Me-Me-Me-Me-F—F—F-Me-Me-Me-Me-Me-Me-Me-Me-Me-Me, or
[0252] ia-ia-Me-Me-Me-Me-Me-Me-F-Me-F—F—F-Me-Me-Me-Me-Me-Me-Me-Me-Me-Me, or
[0253] Me-Me-Me-Me-Me-Me-F—F—F—F—F-Me-Me-Me-Me-Me-Me-Me-F-Me-Me-ia-ia, or
[0254] Me-Me-Me-Me-Me-F—F-Me-F—F—F—F-Me-Me-Me-Me-Me-Me-Me-Me-Me-ia-ia, or
[0255] Me-Me-Me-Me-Me-Me-F-Me-F—F—F—F-Me-Me-Me-Me-Me-Me-Me-Me-Me-ia-ia, or
[0256] Me-Me-Me-Me-Me-Me-Me-Me-F—F—F-Me-Me-Me-Me-Me-Me-Me-Me-Me-Me-ia-ia, or
[0257] Me-Me-Me-Me-Me-Me-F-Me-F—F—F-Me-Me-Me-Me-Me-Me-Me-Me-Me-Me-ia-ia,
[0258] wherein ia represents an inverted abasic nucleoside, and when the inverted abasic nucleosides as represented by ia-ia are present at the 3′ terminus of the second strand, said inverted abasic nucleosides are present in a 2 nucleoside overhang.

[0259] A nucleic acid wherein modified nucleosides of said second strand comprise a modification pattern according to any one of the following (5′-3′):
[0260] ia-ia-Me(s)Me(s)Me-Me-Me-Me-F—F—F—F—F-Me-Me-Me-Me-Me-Me-Me-F-Me-Me, or
[0261] ia-ia-Me(s)Me(s)Me-Me-Me-F—F-Me-F—F—F—F-Me-Me-Me-Me-Me-Me-Me-Me-Me, or
[0262] ia-ia-Me(s)Me(s)Me-Me-Me-Me-F-Me-F—F—F—F-Me-Me-Me-Me-Me-Me-Me-Me-Me, or
[0263] ia-ia-Me(s)Me(s)Me-Me-Me-Me-Me-Me-F—F—F-Me-Me-Me-Me-Me-Me-Me-Me-Me-Me, or
[0264] ia-ia-Me(s)Me(s)Me-Me-Me-Me-F-Me-F—F—F-Me-Me-Me-Me-Me-Me-Me-Me-Me-Me, or
[0265] Me-Me-Me-Me-Me-Me-F—F—F—F—F-Me-Me-Me-Me-Me-Me-Me-F(s)Me(s)Me-ia-ia, or
[0266] Me-Me-Me-Me-Me-F—F-Me-F—F—F—F-Me-Me-Me-Me-Me-Me-Me(s)Me(s)Me-ia-ia, or
[0267] Me-Me-Me-Me-Me-Me-F-Me-F—F—F—F-Me-Me-Me-Me-Me-Me-Me(s)Me(s)Me-ia-ia, or
[0268] Me-Me-Me-Me-Me-Me-Me-Me-F—F—F-Me-Me-Me-Me-Me-Me-Me-Me(s)Me(s)Me-ia-ia, or
[0269] Me-Me-Me-Me-Me-Me-F-Me-F—F—F-Me-Me-Me-Me-Me-Me-Me-Me(s)Me(s)Me-ia-ia,
[0270] wherein:
[0271] (s) is a phosphorothioate internucleoside linkage, ia represents an inverted abasic nucleoside, and when the inverted abasic nucleosides as represented by ia-ia are present at the 3′ terminus of the second strand, said inverted abasic nucleosides are present in a 2 nucleoside overhang.

[0272] A nucleic acid wherein modified nucleosides comprise any one of the following modification patterns:
[0273] Modification pattern 1: Second strand (5′-3′): Me-Me-Me-Me-Me-Me-F—F—F—F—F-Me-Me-Me-Me-Me-Me-Me-F-Me-Me, First strand (5′-3′): Me-F-Me-F-Me-F-Me-F—F-Me-Me-Me-Me-F-Me-F-Me-Me-Me-Me-Me-Me-Me
[0274] Or Modification pattern 2: Second strand (5′-3′): Me-Me-Me-Me-Me-F—F-Me-F—F—F—F-Me-Me-Me-Me-Me-Me-Me-Me-Me, First strand (5′-3′): Me-F-Me-F-Me-F-Me-F—F-Me-Me-Me-Me-F-Me-F-Me-Me-Me-Me-Me-Me-Me
[0275] Or Modification pattern 3: Second strand (5′-3′): Me-Me-Me-Me-Me-Me-F-Me-F—F—F—F-Me-Me-Me-Me-Me-Me-Me-Me-Me, First strand (5′-3′): Me-F-Me-F-Me-F-Me-F—F-Me-Me-Me-Me-F-Me-F-Me-Me-Me-Me-Me-Me-Me
[0276] Or Modification pattern 4: Second strand (5′-3′): Me-Me-Me-Me-Me-Me-F-Me-F—F—F—F-Me-Me-Me-Me-Me-Me-Me-Me-Me, First strand (5′-3′): Me-F-Me-F-Me-F-Me-Me-Me-Me-Me-Me-Me-F-Me-F-Me-Me-Me-Me-Me-Me-Me
[0277] Or Modification pattern 5: Second strand (5′-3′): Me-Me-Me-Me-Me-Me-Me-Me-F—F—F-Me-Me-Me-Me-Me-Me-Me-Me-Me-Me, First strand (5′-3′): Me-F-Me-Me-Me-F-Me-Me-F-Me-Me-Me-Me-F-Me-F-Me-Me-Me-Me-Me-Me-Me
[0278] Or Modification pattern 6: Second strand (5′-3′): Me-Me-Me-Me-Me-Me-F-Me-F—F—F-Me-Me-Me-Me-Me-Me-Me-Me-Me-Me, First strand (5′-3′): Me-F-Me-Me-Me-F-Me-Me-F-Me-Me-Me-Me-F-Me-F-Me-Me-Me-Me-Me-Me-Me.

[0279] A nucleic acid wherein modified nucleosides comprise any one of the following modification patterns:
[0280] Modification pattern 1: Second strand (5′-3′): Me(s)Me(s)Me-Me-Me-Me-F—F—F—F—F-Me-Me-Me-Me-Me-Me-Me-F-Me-Me, First strand (5′-3′): Me(s)F(s)Me-F-Me-F-Me-F—F-Me-Me-Me-Me-F-Me-F-Me-Me-Me-Me-Me(s)Me(s)Me
[0281] Or Modification pattern 2: Second strand (5′-3′): Me(s)Me(s)Me-Me-Me-F—F-Me-F—F—F—F-Me-Me-Me-Me-Me-Me-Me-Me-Me, First strand (5′-3′): Me(s)F(s)Me-F-Me-F-Me-F—F-Me-Me-Me-Me-F-Me-F-Me-Me-Me-Me-Me(s)Me(s)Me
[0282] Or Modification pattern 3: Second strand (5′-3′): Me(s)Me(s)Me-Me-Me-Me-F-Me-F—F—F—F-Me-Me-Me-Me-Me-Me-Me-Me-Me, First strand (5′-3′): Me(s)F(s)Me-F-Me-F-Me-F—F-Me-Me-Me-Me-F-Me-F-Me-Me-Me-Me-Me(s)Me(s)Me
[0283] Or Modification pattern 4: Second strand (5′-3′): Me(s)Me(s)Me-Me-Me-Me-F-Me-F—F—F—F-Me-Me-Me-Me-Me-Me-Me-Me-Me, First strand (5′-3′): Me(s)F(s)Me-F-Me-F-Me-Me-Me-Me-Me-Me-Me-F-Me-F-Me-Me-Me-Me-Me(s)Me(s)Me
[0284] Or Modification pattern 5: Second strand (5′-3′): Me(s)Me(s)Me-Me-Me-Me-Me-Me-F—F—F-Me-Me-Me-Me-Me-Me-Me-Me-Me-Me, First strand (5′-3′): Me(s)F(s)Me-Me-Me-F-Me-Me-F-Me-Me-Me-Me-F-Me-F-Me-Me-Me-Me-Me(s)Me(s)Me
[0285] Or Modification pattern 6: Second strand (5′-3′): Me(s)Me(s)Me-Me-Me-Me-F-Me-F—F—F-Me-Me-Me-Me-Me-Me-Me-Me-Me-Me, First strand (5′-3′): Me(s)F(s)Me-Me-Me-F-Me-Me-F-Me-Me-Me-Me-F-Me-F-Me-Me-Me-Me-Me(s)Me(s)Me
[0286] wherein(s) is a phosphorothioate internucleoside linkage.

[0287] A nucleic acid wherein modified nucleosides comprise any one of the following modification patterns:
[0288] Modification pattern 1: Second strand (5′-3′): Me-Me-Me-Me-Me-Me-F—F—F—F—F-Me-Me-Me-Me-Me-Me-Me-F(s)Me(s)Me, First strand (5′-3′): Me(s)F(s)Me-F-Me-F-Me-F—F-Me-Me-Me-Me-F-Me-F-Me-Me-Me-Me-Me(s)Me(s)Me
[0289] Or Modification pattern 2: Second strand (5′-3′): Me-Me-Me-Me-Me-F—F-Me-F—F—F—F-Me-Me-Me-Me-Me-Me-Me(s)Me(s)Me, First strand (5′-3′): Me(s)F(s)Me-F-Me-F-Me-F—F-Me-Me-Me-Me-F-Me-F-Me-Me-Me-Me-Me(s)Me(s)Me
[0290] Or Modification pattern 3: Second strand (5′-3′): Me-Me-Me-Me-Me-Me-F-Me-F—F—F—F-Me-Me-Me-Me-Me-Me-Me(s)Me(s)Me, First strand (5′-3′): Me(s)F(s)Me-F-Me-F-Me-F—F-Me-Me-Me-Me-F-Me-F-Me-Me-Me-Me-Me(s)Me(s)Me
[0291] Or Modification pattern 4: Second strand (5′-3′): Me-Me-Me-Me-Me-Me-F-Me-F—F—F—F-Me-Me-Me-Me-Me-Me-Me(s)Me(s)Me, First strand (5′-3′): Me(s)F(s)Me-F-Me-F-Me-Me-Me-Me-Me-Me-Me-F-Me-F-Me-Me-Me-Me-Me(s)Me(s)Me
[0292] Or Modification pattern 5: Second strand (5′-3′): Me-Me-Me-Me-Me-Me-Me-Me-F—F—F-Me-Me-Me-Me-Me-Me-Me-Me(s)Me(s)Me, First strand (5′-3′): Me(s)F(s)Me-Me-Me-F-Me-Me-F-Me-Me-Me-Me-F-Me-F-Me-Me-Me-Me-Me(s)Me(s)Me
[0293] Or Modification pattern 6: Second strand (5′-3′): Me-Me-Me-Me-Me-Me-F-Me-F—F—F-Me-Me-Me-Me-Me-Me-Me-Me(s)Me(s)Me, First strand (5′-3′): Me(s)F(s)Me-Me-Me-F-Me-Me-F-Me-Me-Me-Me-F-Me-F-Me-Me-Me-Me-Me(s)Me(s)Me
[0294] wherein(s) is a phosphorothioate internucleoside linkage.

[0295] A nucleic acid wherein modified nucleosides comprise any one of the following modification patterns:
[0296] Modification pattern 1: Second strand (5′-3′): ia-ia-Me-Me-Me-Me-Me-Me-F—F—F—F—F-Me-Me-Me-Me-Me-Me-Me-F-Me-Me, First strand (5′-3′): Me-F-Me-F-Me-F-Me-F—F-Me-Me-Me-Me-F-Me-F-Me-Me-Me-Me-Me-Me-Me
[0297] Or Modification pattern 2: Second strand (5′-3′): ia-ia-Me-Me-Me-Me-Me-F—F-Me-F—F—F—F-Me-Me-Me-Me-Me-Me-Me-Me-Me, First strand (5′-3′): Me-F-Me-F-Me-F-Me-F—F-Me-Me-Me-Me-F-Me-F-Me-Me-Me-Me-Me-Me-Me
[0298] Or Modification pattern 3: Second strand (5′-3′): ia-ia-Me-Me-Me-Me-Me-Me-F-Me-F—F—F—F-Me-Me-Me-Me-Me-Me-Me-Me-Me, First strand (5′-3′): Me-F-Me-F-Me-F-Me-F—F-Me-Me-Me-Me-F-Me-F-Me-Me-Me-Me-Me-Me-Me
[0299] Or Modification pattern 4: Second strand (5′-3′): ia-ia-Me-Me-Me-Me-Me-Me-F-Me-F—F—F—F-Me-Me-Me-Me-Me-Me-Me-Me-Me, First strand (5′-3′): Me-F-Me-F-Me-F-Me-Me-Me-Me-Me-Me-Me-F-Me-F-Me-Me-Me-Me-Me-Me-Me
[0300] Or Modification pattern 5: Second strand (5′-3′): ia-ia-Me-Me-Me-Me-Me-Me-Me-Me-F—F—F-Me-Me-Me-Me-Me-Me-Me-Me-Me-Me, First strand (5′-3′): Me-F-Me-Me-Me-F-Me-Me-F-Me-Me-Me-Me-F-Me-F-Me-Me-Me-Me-Me-Me-Me
[0301] Or Modification pattern 6: Second strand (5′-3′): ia-ia-Me-Me-Me-Me-Me-Me-F-Me-F—F—F-Me-Me-Me-Me-Me-Me-Me-Me-Me-Me, First strand (5′-3′): Me-F-Me-Me-Me-F-Me-Me-F-Me-Me-Me-Me-F-Me-F-Me-Me-Me-Me-Me-Me-Me,
[0302] wherein ia represents an inverted abasic nucleoside.

[0303] A nucleic acid wherein modified nucleosides comprise any one of the following modification patterns:
[0304] Modification pattern 1: Second strand (5′-3′): Me-Me-Me-Me-Me-Me-F—F—F—F—F-Me-Me-Me-Me-Me-Me-Me-F-Me-Me-ia-ia, First strand (5′-3′): Me-F-Me-F-Me-F-Me-F—F-Me-Me-Me-Me-F-Me-F-Me-Me-Me-Me-Me-Me-Me
[0305] Or Modification pattern 2: Second strand (5′-3′): Me-Me-Me-Me-Me-F—F-Me-F—F—F—F-Me-Me-Me-Me-Me-Me-Me-Me-Me-ia-ia, First strand (5′-3′): Me-F-Me-F-Me-F-Me-F—F-Me-Me-Me-Me-F-Me-F-Me-Me-Me-Me-Me-Me-Me
[0306] Or Modification pattern 3: Second strand (5′-3′): Me-Me-Me-Me-Me-Me-F-Me-F—F—F—F-Me-Me-Me-Me-Me-Me-Me-Me-Me-ia-ia, First strand (5′-3′): Me-F-Me-F-Me-F-Me-F—F-Me-Me-Me-Me-F-Me-F-Me-Me-Me-Me-Me-Me-Me
[0307] Or Modification pattern 4: Second strand (5′-3′): Me-Me-Me-Me-Me-Me-F-Me-F—F—F—F-Me-Me-Me-Me-Me-Me-Me-Me-Me-ia-ia, First strand (5′-3′): Me-F-Me-F-Me-F-Me-Me-Me-Me-Me-Me-Me-F-Me-F-Me-Me-Me-Me-Me-Me-Me
[0308] Or Modification pattern 5: Second strand (5′-3′): Me-Me-Me-Me-Me-Me-Me-Me-F—F—F-Me-Me-Me-Me-Me-Me-Me-Me-Me-Me-ia-ia, First strand (5′-3′): Me-F-Me-Me-Me-F-Me-Me-F-Me-Me-Me-Me-F-Me-F-Me-Me-Me-Me-Me-Me-Me
[0309] Or Modification pattern 6: Second strand (5′-3′): Me-Me-Me-Me-Me-Me-F-Me-F—F—F-Me-Me-Me-Me-Me-Me-Me-Me-Me-Me-ia-ia, First strand (5′-3′): Me-F-Me-Me-Me-F-Me-Me-F-Me-Me-Me-Me-F-Me-F-Me-Me-Me-Me-Me-Me-Me,
[0310] wherein ia represents an inverted abasic nucleoside, and when the inverted abasic nucleosides as represented by ia-ia are present at the 3′ terminus of the second strand, said inverted abasic nucleosides are present in a 2 nucleoside overhang.

[0311] A nucleic acid wherein modified nucleosides comprise any one of the following modification patterns:
[0312] Modification pattern 1: Second strand (5′-3′): ia-ia-Me(s)Me(s)Me-Me-Me-Me-F—F—F—F—F-Me-Me-Me-Me-Me-Me-Me-F-Me-Me, First strand (5′-3′): Me(s)F(s)Me-F-Me-F-Me-F—F-Me-Me-Me-Me-F-Me-F-Me-Me-Me-Me-Me(s)Me(s)Me
[0313] Or Modification pattern 2: Second strand (5′-3′): ia-ia-Me(s)Me(s)Me-Me-Me-F—F-Me-F—F—F—F-Me-Me-Me-Me-Me-Me-Me-Me-Me, First strand (5′-3′): Me(s)F(s)Me-F-Me-F-Me-F—F-Me-Me-Me-Me-F-Me-F-Me-Me-Me-Me-Me(s)Me(s)Me
[0314] Or Modification pattern 3: Second strand (5′-3′): ia-ia-Me(s)Me(s)Me-Me-Me-Me-F-Me-F—F—F—F-Me-Me-Me-Me-Me-Me-Me-Me-Me, First strand (5′-3′): Me(s)F(s)Me-F-Me-F-Me-F—F-Me-Me-Me-Me-F-Me-F-Me-Me-Me-Me-Me(s)Me(s)Me
[0315] Or Modification pattern 4: Second strand (5′-3′): ia-ia-Me(s)Me(s)Me-Me-Me-Me-F-Me-F—F—F—F-Me-Me-Me-Me-Me-Me-Me-Me-Me, First strand (5′-3′): Me(s)F(s)Me-F-Me-F-Me-Me-Me-Me-Me-Me-Me-F-Me-F-Me-Me-Me-Me-Me(s)Me(s)Me
[0316] Or Modification pattern 5: Second strand (5′-3′): ia-ia-Me(s)Me(s)Me-Me-Me-Me-Me-Me-F—F—F-Me-Me-Me-Me-Me-Me-Me-Me-Me-Me, First strand (5′-3′): Me(s)F(s)Me-Me-Me-F-Me-Me-F-Me-Me-Me-Me-F-Me-F-Me-Me-Me-Me-Me(s)Me(s)Me
[0317] Or Modification pattern 6: Second strand (5′-3′): ia-ia-Me(s)Me(s)Me-Me-Me-Me-F-Me-F—F—F-Me-Me-Me-Me-Me-Me-Me-Me-Me-Me, First strand (5′-3′): Me(s)F(s)Me-Me-Me-F-Me-Me-F-Me-Me-Me-Me-F-Me-F-Me-Me-Me-Me-Me(s)Me(s)Me
[0318] wherein:
[0319] (s) is a phosphorothioate internucleoside linkage, ia represents an inverted abasic nucleoside.

[0320] A nucleic acid wherein modified nucleosides comprise any one of the following modification patterns:
[0321] Modification pattern 1: Second strand (5′-3′): Me-Me-Me-Me-Me-Me-F—F—F—F—F-Me-Me-Me-Me-Me-Me-Me-F(s)Me(s)Me-ia-ia, First strand (5′-3′): Me(s)F(s)Me-F-Me-F-Me-F—F-Me-Me-Me-Me-F-Me-F-Me-Me-Me-Me-Me(s)Me(s)Me
[0322] Or Modification pattern 2: Second strand (5′-3′): Me-Me-Me-Me-Me-F—F-Me-F—F—F—F-Me-Me-Me-Me-Me-Me-Me(s)Me(s)Me-ia-ia, First strand (5′-3′): Me(s)F(s)Me-F-Me-F-Me-F—F-Me-Me-Me-Me-F-Me-F-Me-Me-Me-Me-Me(s)Me(s)Me
[0323] Or Modification pattern 3: Second strand (5′-3′): Me-Me-Me-Me-Me-Me-F-Me-F—F—F—F-Me-Me-Me-Me-Me-Me-Me(s)Me(s)Me-ia-ia, First strand (5′-3′): Me(s)F(s)Me-F-Me-F-Me-F—F-Me-Me-Me-Me-F-Me-F-Me-Me-Me-Me-Me(s)Me(s)Me
[0324] Or Modification pattern 4: Second strand (5′-3′): Me-Me-Me-Me-Me-Me-F-Me-F—F—F—F-Me-Me-Me-Me-Me-Me-Me(s)Me(s)Me-ia-ia, First strand (5′-3′): Me(s)F(s)Me-F-Me-F-Me-Me-Me-Me-Me-Me-Me-F-Me-F-Me-Me-Me-Me-Me(s)Me(s)Me
[0325] Or Modification pattern 5: Second strand (5′-3′): Me-Me-Me-Me-Me-Me-Me-Me-F—F—F-Me-Me-Me-Me-Me-Me-Me-Me(s)Me(s)Me-ia-ia, First strand (5′-3′): Me(s)F(s)Me-Me-Me-F-Me-Me-F-Me-Me-Me-Me-F-Me-F-Me-Me-Me-Me-Me(s)Me(s)Me
[0326] Or Modification pattern 6: Second strand (5′-3′): Me-Me-Me-Me-Me-Me-F-Me-F—F—F-Me-Me-Me-Me-Me-Me-Me-Me(s)Me(s)Me-ia-ia, First strand (5′-3′): Me(s)F(s)Me-Me-Me-F-Me-Me-F-Me-Me-Me-Me-F-Me-F-Me-Me-Me-Me-Me(s)Me(s)Me
[0327] wherein: (s) is a phosphorothioate internucleoside linkage, ia represents an inverted abasic nucleoside, and when the inverted abasic nucleosides as represented by ia-ia are present at the 3′ terminus of the second strand, said inverted abasic nucleosides are present in a 2 nucleoside overhang.

[0328] Particularly preferred is a nucleic acid wherein the modified nucleosides comprise the following modification pattern:
[0329] Modification pattern 4: Second strand (5′-3′): ia-ia-Me(s)Me(s)Me-Me-Me-Me-F-Me-F—F—F—F-Me-Me-Me-Me-Me-Me-Me-Me-Me, First strand (5′-3′): Me(s)F(s)Me-F-Me-F-Me-Me-Me-Me-Me-Me-Me-F-Me-F-Me-Me-Me-Me-Me(s)Me(s)Me
[0330] wherein: (s) is a phosphorothioate internucleoside linkage, ia represents an inverted abasic nucleoside.

[0331] A nucleic acid wherein the first strand comprises a 2′ sugar modification pattern wherein said modifications are selected at least from 2′Me and 2′F sugar modifications, provided that the overall number of 2′F sugar modifications in the first strand does not consist of four, or six, 2′F modifications.

[0332] A nucleic acid wherein the first strand comprises a 2′ sugar modification pattern wherein said modifications are selected at least from 2′Me and 2′F sugar modifications, wherein the overall number of 2′F sugar modifications in the first strand consists of three, five or seven 2′F modifications.

[0333] A nucleic acid wherein the first strand comprises a 2′ sugar modification pattern wherein said modifications are selected at least from 2′Me and 2′F sugar modifications, wherein the overall number of 2′F sugar modifications in the first strand consists of three 2′F modifications.

[0334] A nucleic acid wherein the first strand comprises a 2′ sugar modification pattern wherein said modifications are selected at least from 2′Me and 2′F sugar modifications, wherein the overall number of 2′F sugar modifications in the first strand consists of five 2′F modifications.

[0335] A nucleic acid wherein the first strand comprises a 2′ sugar modification pattern as follows (5′-3′):
[0336] Me-F-Me-X₂-Me-F-(Me)₇-(F-Me)₂-X₃-Me-X₄-(Me)₃
[0337] wherein X₂, X₃ and X₄ are selected from 2′Me and 2′F sugar modifications, provided that for X₂, X₃ and X₄ at least one is a 2′F sugar modification, and the other two sugar modifications are 2′Me sugar modifications.

[0338] A nucleic acid wherein the first strand comprises a 2′ sugar modification pattern as follows (5′-3′):
[0339] Me-F-Me-X₂-Me-F-(Me)₇-(F-Me)₂-X₃-Me-X₄-(Me)₃
[0340] wherein X₂ is a 2′F sugar modification, and X₃ and X₄ are 2′Me sugar modifications.

[0341] A nucleic acid wherein the first strand comprises a 2′ sugar modification pattern as follows (5′-3′):
[0342] Me-F-Me-X₂-Me-F-(Me)₇-(F-Me)₂-X₃-Me-X₄-(Me)₃
[0343] wherein X₃ is a 2′F sugar modification, and X₂ and X₄ are 2′Me sugar modifications.

[0344] A nucleic acid wherein the first strand comprises a 2′ sugar modification pattern as follows (5′-3′):
[0345] Me-F-Me-X₂-Me-F-(Me)₇-(F-Me)₂-X₃-Me-X₄-(Me)₃
[0346] wherein X₄ is a 2′F sugar modification, and X₂ and X₃ are 2′Me sugar modifications.

[0347] A nucleic acid wherein the first strand comprises a 2′ sugar modification pattern wherein said modifications are selected at least from 2′Me and 2′F sugar modifications, wherein the overall number of 2′F sugar modifications in the first strand consists of seven 2′F modifications.

[0348] A nucleic acid wherein the first strand comprises a 2′ sugar modification pattern as follows (5′-3′):
[0349] Me-F-Me-X₂-Me-F-Me-(F)₂-(Me)₄-(F-Me)₂-X₃-Me-X₄-(Me)₃
[0350] wherein X₂, X₃ and X₄ are selected from 2′Me and 2′F sugar modifications, provided that for X₂, X₃ and X₄ at least one is a 2′F sugar modification, and the other two sugar modifications are 2′Me sugar modifications.

[0351] A nucleic acid wherein the first strand comprises a 2′ sugar modification pattern as follows (5′-3′):
[0352] Me-F-Me-X₂-Me-F-Me-(F)₂-(Me)₄-(F-Me)₂-X₃-Me-X₄-(Me)₃
[0353] wherein X₂ is a 2′F sugar modification, and X₃ and X₄ are 2′Me sugar modifications.

[0354] A nucleic acid wherein the first strand comprises a 2′ sugar modification pattern as follows (5′-3′):
[0355] Me-F-Me-X₂-Me-F-Me-(F)₂-(Me)₄-(F-Me)₂-X₃-Me-X₄-(Me)₃
[0356] wherein X₃ is a 2′F sugar modification, and X₂ and X₄ are 2′Me sugar modifications.

[0357] A nucleic acid wherein the first strand comprises a 2′ sugar modification pattern as follows (5′-3′):
[0358] Me-F-Me-X₂-Me-F-Me-(F)₂-(Me)₄-(F-Me)₂-X₃-Me-X₄-(Me)₃
[0359] wherein X₄ is a 2′F sugar modification, and X₂ and X₃ are 2′Me sugar modifications.

[0360] A nucleic acid wherein the first strand comprises a 2′ sugar modification pattern as follows (5′-3′):
[0361] Me-F-(Me)₃-X₁-(Me)₇-F-Me-F-(Me)₇
[0362] wherein X₁ is a thermally destabilising modification.

[0363] A nucleic acid wherein the first strand comprises a 2′ sugar modification pattern as follows (5′-3′):
[0364] Me-F-(Me)₃-X₁-Me-(F)₂-(Me)₄-F-Me-F-(Me)₇
[0365] wherein X₁ is a thermally destabilising modification.

[0366] A nucleic acid wherein the second strand comprises a 2′ sugar modification pattern as follows (5′-3′):
[0367] (Me)₈-(F)₃-(Me)₁₀.

[0368] A nucleic acid wherein the second strand comprises a 2′ sugar modification pattern as follows (5′-3′):
[0369] (Me)₈-(F)₃-(Me)₁₀, and
[0370] wherein the first strand comprises a 2′ sugar modification pattern wherein said modifications are selected at least from 2′Me and 2′F sugar modifications, provided that the overall number of 2′F sugar modifications in the first strand does not consist of four, or six, 2′F modifications.

[0371] A nucleic acid wherein the second strand comprises a 2′ sugar modification pattern as follows (5′-3′):
[0372] (Me)₈-(F)₃-(Me)₁₀, and
   wherein the first strand comprises a 2′ sugar modification pattern wherein said modifications are selected at least from 2′Me and 2′F sugar modifications, wherein the overall number of 2′F sugar modifications in the first strand consists of three, five or seven 2′F modifications.

[0373] A nucleic acid comprising a first strand that is at least partially complementary to a portion of RNA transcribed from the target gene, and a second strand that is at least partially complementary to the first strand, wherein said first and second strands form a duplex region of at least 17 nucleosides in length, and wherein nucleosides of said second strand comprise a 2′ sugar modification pattern as follows (5′-3′):
[0374] (Me)₈-(F)₃-(Me)₁₀, and
   wherein nucleosides of said first strand comprise a 2′ sugar modification pattern as follows (5′-3′):
[0375] Me-F-(Me)₃-X₁-(Me)₇-F-Me-F-(Me)₇, wherein X₁ is a thermally destabilising modification.

[0376] A nucleic acid comprising a first strand that is at least partially complementary to a portion of RNA transcribed from the target gene, and a second strand that is at least partially complementary to the first strand, wherein said first and second strands form a duplex region of at least 17 nucleosides in length, and wherein nucleosides of said second strand comprise a 2′ sugar modification pattern as follows (5′-3′):
[0377] (Me)₈-(F)₃-(Me)₁₀, and
[0378] wherein nucleosides of said first strand comprise a 2′ sugar modification pattern as follows (5′-3′):
[0379] (Me-F)₃-(Me)₇-F-Me-F-(Me)₇.

[0380] A nucleic acid comprising a first strand that is at least partially complementary to a portion of RNA transcribed from the target gene, and a second strand that is at least partially complementary to the first strand, wherein said first and second strands form a duplex region of at least 17 nucleosides in length, and wherein nucleosides of said second strand comprise a 2′ sugar modification pattern as follows (5′-3′):
[0381] (Me)₈-(F)₃-(Me)₁₀, and
[0382] wherein nucleosides of said first strand comprise a 2′ sugar modification pattern as follows (5′-3′):
[0383] Me-F-(Me)₃-F-(Me)₇-(F-Me)₂-F-(Me)₅.

[0384] A nucleic acid comprising a first strand that is at least partially complementary to a portion of RNA transcribed from the target gene, and a second strand that is at least partially complementary to the first strand, wherein said first and second strands form a duplex region of at least 17 nucleosides in length, and wherein nucleosides of said second strand comprise a 2′ sugar modification pattern as follows (5′-3′):
[0385] (Me)₈-(F)₃-(Me)₁₀, and
   wherein nucleosides of said first strand comprise a 2′ sugar modification pattern as follows (5′-3′):
[0386] Me-F-(Me)₃-F-(Me)₇-F-Me-F-(Me)₃-F-(Me)₃.

[0387] A nucleic acid comprising a first strand that is at least partially complementary to a portion of RNA transcribed from the target gene, and a second strand that is at least partially complementary to the first strand, wherein said first and second strands form a duplex region of at least 17 nucleosides in length, and wherein nucleosides of said second strand comprise a 2′ sugar modification pattern as follows (5′-3′):
[0388] (Me)₈-(F)₃-(Me)₁₀, and
[0389] wherein nucleosides of said first strand comprise a 2′ sugar modification pattern as follows (5′-3′):
[0390] Me-F-(Me)₃-X₁-Me-(F)₂-(Me)₄-F-Me-F-(Me)₇, wherein X₁ is a thermally destabilising modification.

[0391] A nucleic acid comprising a first strand that is at least partially complementary to a portion of RNA transcribed from the target gene, and a second strand that is at least partially complementary to the first strand, wherein said first and second strands form a duplex region of at least 17 nucleosides in length, and wherein nucleosides of said second strand comprise a 2′ sugar modification pattern as follows (5′-3′):
[0392] (Me)₈-(F)₃-(Me)₁₀, and
[0393] wherein nucleosides of said first strand comprise a 2′ sugar modification pattern as follows (5′-3′):
[0394] (Me-F)₃-Me-(F)₂-(Me)₄-(F-Me)₂-(Me)₆.

[0395] A nucleic acid comprising a first strand that is at least partially complementary to a portion of RNA transcribed from the target gene, and a second strand that is at least partially complementary to the first strand, wherein said first and second strands form a duplex region of at least 17 nucleosides in length, and wherein nucleosides of said second strand comprise a 2′ sugar modification pattern as follows (5′-3′):
[0396] (Me)₈-(F)₃-(Me)₁₀, and
[0397] wherein nucleosides of said first strand comprise a 2′ sugar modification pattern as follows (5′-3′):
[0398] Me-F-(Me)₃-F-Me-(F)₂-(Me)₄-(F-Me)₂-F-(Me)₅.

[0399] A nucleic acid comprising a first strand that is at least partially complementary to a portion of RNA transcribed from the target gene, and a second strand that is at least partially complementary to the first strand, wherein said first and second strands form a duplex region of at least 17 nucleosides in length, and wherein nucleosides of said second strand comprise a 2′ sugar modification pattern as follows (5′-3′):
[0400] (Me)₈-(F)₃-(Me)₁₀, and
[0401] wherein nucleosides of said first strand comprise a 2′ sugar modification pattern as follows (5′-3′):
[0402] Me-F-(Me)₃-F-Me-(F)₂-(Me)₄-(F-Me)₂-(Me)₂-F-(Me)₃.

[0403] A nucleic acid wherein the second strand comprises a 2′ sugar, and abasic modification pattern as follows (5′-3′):
[0404] ia-ia-(Me)₈-(F)₃-(Me)₁₀
[0405] wherein ia represents an inverted abasic nucleoside.

[0406] A nucleic acid wherein the second strand comprises a 2′ sugar, and abasic modification pattern as follows (5′-3′):
[0407] ia-ia-(Me)₈-(F)₃-(Me)₁₀, wherein ia represents an inverted abasic nucleoside; and
[0408] wherein the first strand comprises a 2′ sugar modification pattern wherein said modifications are selected at least from 2′Me and 2′F sugar modifications, provided that the overall number of 2′F sugar modifications in the first strand does not consist of four, or six, 2′F modifications.

[0409] A nucleic acid wherein the second strand comprises a 2′ sugar, and abasic modification pattern as follows (5′-3′):
[0410] ia-ia-(Me)₈-(F)₃-(Me)₁₀, wherein ia represents an inverted abasic nucleoside; and
[0411] wherein the first strand comprises a 2′ sugar modification pattern wherein said modifications are selected at least from 2′Me and 2′F sugar modifications, wherein the overall number of 2′F sugar modifications in the first strand consists of three, five or seven 2′F modifications.

[0412] A nucleic acid comprising a first strand that is at least partially complementary to a portion of RNA transcribed from the target gene, and a second strand that is at least partially complementary to the first strand, wherein said first and second strands form a duplex region of at least 17 nucleosides in length, and wherein nucleosides of said second strand comprise a 2′ sugar, and abasic modification pattern as follows (5′-3′):
[0413] ia-ia-(Me)₈-(F)₃-(Me)₁₀, wherein ia represents an inverted abasic nucleoside; and
[0414] wherein nucleosides of said first strand comprise a 2′ sugar modification pattern as follows (5′-3′):
[0415] Me-F-(Me)₃-X₁-(Me)₇-F-Me-F-(Me)₇, wherein X₁ is a thermally destabilising modification.

[0416] A nucleic acid comprising a first strand that is at least partially complementary to a portion of RNA transcribed from the target gene, and a second strand that is at least partially complementary to the first strand, wherein said first and second strands form a duplex region of at least 17 nucleosides in length, and wherein nucleosides of said second strand comprise a 2′ sugar, and abasic modification pattern as follows (5′-3′):
[0417] ia-ia-(Me)₈-(F)₃-(Me)₁₀, wherein ia represents an inverted abasic nucleoside; and
[0418] wherein nucleosides of said first strand comprise a 2′ sugar modification pattern as follows (5′-3′):
[0419] (Me-F)₃-(Me)₇-F-Me-F-(Me)₇.

[0420] A nucleic acid comprising a first strand that is at least partially complementary to a portion of RNA transcribed from the target gene, and a second strand that is at least partially complementary to the first strand, wherein said first and second strands form a duplex region of at least 17 nucleosides in length, and wherein nucleosides of said second strand comprise a 2′ sugar, and abasic modification pattern as follows (5′-3′):
[0421] ia-ia-(Me)₈-(F)₃-(Me)₁₀, wherein ia represents an inverted abasic nucleoside; and
[0422] wherein nucleosides of said first strand comprise a 2′ sugar modification pattern as follows (5′-3′):
[0423] Me-F-(Me)₃-F-(Me)₇-(F-Me)₂-F-(Me)₅.

[0424] A nucleic acid comprising a first strand that is at least partially complementary to a portion of RNA transcribed from the target gene, and a second strand that is at least partially complementary to the first strand, wherein said first and second strands form a duplex region of at least 17 nucleosides in length, and wherein nucleosides of said second strand comprise a 2′ sugar, and abasic modification pattern as follows (5′-3′):
[0425] ia-ia-(Me)₈-(F)₃-(Me)₁₀, wherein ia represents an inverted abasic nucleoside; and
[0426] wherein nucleosides of said first strand comprise a 2′ sugar modification pattern as follows (5′-3′):
[0427] Me-F-(Me)₃-F-(Me)₇-F-Me-F-(Me)₃-F-(Me)₃.

[0428] A nucleic acid comprising a first strand that is at least partially complementary to a portion of RNA transcribed from the target gene, and a second strand that is at least partially complementary to the first strand, wherein said first and second strands form a duplex region of at least 17 nucleosides in length, and wherein nucleosides of said second strand comprise a 2′ sugar, and abasic modification pattern as follows (5′-3′):
[0429] ia-ia-(Me)₈-(F)₃-(Me)₁₀, wherein ia represents an inverted abasic nucleoside; and
[0430] wherein nucleosides of said first strand comprise a 2′ sugar modification pattern as follows (5′-3′):
[0431] Me-F-(Me)₃-X₁-Me-(F)₂-(Me)₄-F-Me-F-(Me)₇,
[0432] wherein X₁ is a thermally destabilising modification.

[0433] A nucleic acid comprising a first strand that is at least partially complementary to a portion of RNA transcribed from the target gene, and a second strand that is at least partially complementary to the first strand, wherein said first and second strands form a duplex region of at least 17 nucleosides in length, and wherein nucleosides of said second strand comprise a 2′ sugar, and abasic modification pattern as follows (5′-3′):
[0434] ia-ia-(Me)₈-(F)₃-(Me)₁₀, wherein ia represents an inverted abasic nucleoside; and
[0435] wherein nucleosides of said first strand comprise a 2′ sugar modification pattern as follows (5′-3′):
[0436] (Me-F)₃-Me-(F)₂-(Me)₄-(F-Me)₂-(Me)₆.

[0437] A nucleic acid comprising a first strand that is at least partially complementary to a portion of RNA transcribed from the target gene, and a second strand that is at least partially complementary to the first strand, wherein said first and second strands form a duplex region of at least 17 nucleosides in length, and wherein nucleosides of said second strand comprise a 2′ sugar, and abasic modification pattern as follows (5′-3′):
[0438] ia-ia-(Me)₈-(F)₃-(Me)₁₀, wherein ia represents an inverted abasic nucleoside; and
[0439] wherein nucleosides of said first strand comprise a 2′ sugar modification pattern as follows (5′-3′):
[0440] Me-F-(Me)₃-F-Me-(F)₂-(Me)₄-(F-Me)₂-F-(Me)₅.

[0441] A nucleic acid comprising a first strand that is at least partially complementary to a portion of RNA transcribed from the target gene, and a second strand that is at least partially complementary to the first strand, wherein said first and second strands form a duplex region of at least 17 nucleosides in length, and wherein nucleosides of said second strand comprise a 2′ sugar, and abasic modification pattern as follows (5′-3′):
[0442] ia-ia-(Me)₈-(F)₃-(Me)₁₀, wherein ia represents an inverted abasic nucleoside; and
[0443] wherein nucleosides of said first strand comprise a 2′ sugar modification pattern as follows (5′-3′):
[0444] Me-F-(Me)₃-F-Me-(F)₂-(Me)₄-(F-Me)₂-(Me)₂-F-(Me)₃.

[0445] A nucleic acid wherein the second strand comprises a 2′ sugar modification pattern as follows (5′-3′):
[0446] ia-ia-Me(s)Me(s)(Me)₆-(F)₃-(Me)₁₀.
[0447] wherein ia represents an inverted abasic nucleoside, and(s) represents a phosphorothioate linkage.

[0448] A nucleic acid wherein the second strand comprises a 2′ sugar modification pattern as follows (5′-3′):
[0449] ia-ia-Me(s)Me(s)(Me)₆-(F)₃-(Me)₁₀, wherein ia represents an inverted abasic nucleoside, and(s) represents a phosphorothioate linkage; and
[0450] wherein the first strand comprises a 2′ sugar modification pattern wherein said modifications are selected at least from 2′Me and 2′F sugar modifications, provided that the overall number of 2′F sugar modifications in the first strand does not consist of four, or six, 2′F modifications.

[0451] A nucleic acid wherein the second strand comprises a 2′ sugar modification pattern as follows (5′-3′):
[0452] ia-ia-Me(s)Me(s)(Me)₆-(F)₃-(Me)₁₀, wherein ia represents an inverted abasic nucleoside, and(s) represents a phosphorothioate linkage; and
[0453] wherein the first strand comprises a 2′ sugar modification pattern wherein said modifications are selected at least from 2′Me and 2′F sugar modifications, wherein the overall number of 2′F sugar modifications in the first strand consists of three, five or seven 2′F modifications.

[0454] A nucleic acid comprising a first strand that is at least partially complementary to a portion of RNA transcribed from the target gene, and a second strand that is at least partially complementary to the first strand, wherein said first and second strands form a duplex region of at least 17 nucleosides in length, and wherein nucleosides of said second strand comprise a 2′ sugar, and abasic modification pattern as follows (5′-3′):
[0455] ia-ia-Me(s)Me(s)(Me)₆-(F)₃-(Me)₁₀, wherein ia represents an inverted abasic nucleoside, and(s) represents a phosphorothioate linkage, and
[0456] wherein nucleosides of said first strand comprise a 2′ sugar modification pattern as follows (5′-3′):
[0457] Me(s)F(s)(Me)₃-X₁-(Me)₇-F-Me-F-(Me)₅(s)Me(s)Me, wherein X₁ is a thermally destabilising modification.

[0458] A nucleic acid comprising a first strand that is at least partially complementary to a portion of RNA transcribed from the target gene, and a second strand that is at least partially complementary to the first strand, wherein said first and second strands form a duplex region of at least 17 nucleosides in length, and wherein nucleosides of said second strand comprise a 2′ sugar, and abasic modification pattern as follows (5′-3′):
[0459] ia-ia-Me(s)Me(s)(Me)₆-(F)₃-(Me)₁₀, wherein ia represents an inverted abasic nucleoside, and(s) represents a phosphorothioate linkage, and
[0460] wherein nucleosides of said first strand comprise a 2′ sugar modification pattern as follows (5′-3′):
[0461] Me(s)F(s)Me-F-Me-F-(Me)₇-F-Me-F-(Me)₅(s)Me(s)Me.

[0462] A nucleic acid comprising a first strand that is at least partially complementary to a portion of RNA transcribed from the target gene, and a second strand that is at least partially complementary to the first strand, wherein said first and second strands form a duplex region of at least 17 nucleosides in length, and wherein nucleosides of said second strand comprise a 2′ sugar, and abasic modification pattern as follows (5′-3′):
[0463] ia-ia-Me(s)Me(s)(Me)₆-(F)₃-(Me)₁₀, wherein ia represents an inverted abasic nucleoside, and(s) represents a phosphorothioate linkage, and
[0464] wherein nucleosides of said first strand comprise a 2′ sugar modification pattern as follows (5′-3′):
[0465] Me(s)F(s)(Me)₃-F-(Me)₇-(F-Me)₂-F-(Me)₃ (s)Me(s)Me.

[0466] A nucleic acid comprising a first strand that is at least partially complementary to a portion of RNA transcribed from the target gene, and a second strand that is at least partially complementary to the first strand, wherein said first and second strands form a duplex region of at least 17 nucleosides in length, and wherein nucleosides of said second strand comprise a 2′ sugar, and abasic modification pattern as follows (5′-3′):
[0467] ia-ia-Me(s)Me(s)(Me)₆-(F)₃-(Me)₁₀, wherein ia represents an inverted abasic nucleoside, and(s) represents a phosphorothioate linkage, and
[0468] wherein nucleosides of said first strand comprise a 2′ sugar modification pattern as follows (5′-3′):
[0469] Me(s)F(s)(Me)₃-F-(Me)₇-F-Me-F-(Me)₃-F-Me(s)Me(s)Me.

[0470] A nucleic acid comprising a first strand that is at least partially complementary to a portion of RNA transcribed from the target gene, and a second strand that is at least partially complementary to the first strand, wherein said first and second strands form a duplex region of at least 17 nucleosides in length, and wherein nucleosides of said second strand comprise a 2′ sugar, and abasic modification pattern as follows (5′-3′):
[0471] ia-ia-Me(s)Me(s)(Me)₆-(F)₃-(Me)₁₀, wherein ia represents an inverted abasic nucleoside, and(s) represents a phosphorothioate linkage, and
[0472] wherein nucleosides of said first strand comprise a 2′ sugar modification pattern as follows (5′-3′):
[0473] Me(s)F(s)(Me)₃-X₁-Me-(F)₂-(Me)₄-F-Me-F-(Me) s(s)Me(s)Me, wherein X₁ is a thermally destabilising modification.

[0474] A nucleic acid comprising a first strand that is at least partially complementary to a portion of RNA transcribed from the target gene, and a second strand that is at least partially complementary to the first strand, wherein said first and second strands form a duplex region of at least 17 nucleosides in length, and wherein nucleosides of said second strand comprise a 2′ sugar, and abasic modification pattern as follows (5′-3′):
[0475] ia-ia-Me(s)Me(s)(Me)₆-(F)₆-(Me)₁₀, wherein ia represents an inverted abasic nucleoside, and(s) represents a phosphorothioate linkage, and
[0476] wherein nucleosides of said first strand comprise a 2′ sugar modification pattern as follows (5′-3′):
[0477] Me(s)F(s)Me-F-Me-F-Me-(F)₂-(Me)₄-(F-Me)₂-(Me)₄(s)Me(s)Me.

[0478] A nucleic acid comprising a first strand that is at least partially complementary to a portion of RNA transcribed from the target gene, and a second strand that is at least partially complementary to the first strand, wherein said first and second strands form a duplex region of at least 17 nucleosides in length, and wherein nucleosides of said second strand comprise a 2′ sugar, and abasic modification pattern as follows (5′-3′):
[0479] ia-ia-Me(s)Me(s)(Me)₆-(F)₃-(Me)₁₀, wherein ia represents an inverted abasic nucleoside, and(s) represents a phosphorothioate linkage, and
[0480] wherein nucleosides of said first strand comprise a 2′ sugar modification pattern as follows (5′-3′):
[0481] Me(s)F(s)(Me)₃-F-Me-(F)₂-(Me)₄-(F-Me)₂-F-(Me)₃ (s)Me(s)Me.

[0482] A nucleic acid comprising a first strand that is at least partially complementary to a portion of RNA transcribed from the target gene, and a second strand that is at least partially complementary to the first strand, wherein said first and second strands form a duplex region of at least 17 nucleosides in length, and wherein nucleosides of said second strand comprise a 2′ sugar, and abasic modification pattern as follows (5′-3′):
[0483] ia-ia-Me(s)Me(s)(Me)₆-(F)₃-(Me)₁₀, wherein ia represents an inverted abasic nucleoside, and(s) represents a phosphorothioate linkage, and
[0484] wherein nucleosides of said first strand comprise a 2′ sugar modification pattern as follows (5′-3′):
[0485] Me(s)F(s)(Me)₃-F-Me-(F)₂-(Me)₄-(F-Me)₂-(Me)₂-F-Me(s)Me(s)Me.

[0486] Preferred modifications are as follows:

[0487] Modification pattern 1:
[0488] Second strand (5′-3′): ia-ia-Me-Me-Me-Me-Me-Me-Me-Me-F—F—F-Me-Me-Me-Me-Me-Me-Me-Me-Me-Me,
[0489] First strand (5′-3′): Me-F-Me-Me-Me-X₁-Me-Me-Me-Me-Me-Me-Me-F-Me-F-Me-Me-Me-Me-Me-Me-Me, wherein X₁ is a thermally destabilising modification:

[0490] Or Modification pattern 2:
[0491] Second strand (5′-3′): ia-ia-Me-Me-Me-Me-Me-Me-Me-Me-F—F—F-Me-Me-Me-Me-Me-Me-Me-Me-Me-Me,
[0492] First strand (5′-3′): Me-F-Me-F-Me-F-Me-Me-Me-Me-Me-Me-Me-F-Me-F-Me-Me-Me-Me-Me-Me-Me.

[0493] Or Modification pattern 3:
[0494] Second strand (5′-3′): ia-ia-Me-Me-Me-Me-Me-Me-Me-Me-F—F—F-Me-Me-Me-Me-Me-Me-Me-Me-Me-Me,
[0495] First strand (5′-3′): Me-F-Me-Me-Me-F-Me-Me-Me-Me-Me-Me-Me-F-Me-F-Me-F-Me-Me-Me-Me-Me:

[0496] Or Modification pattern 4:
[0497] Second strand (5′-3′): ia-ia-Me-Me-Me-Me-Me-Me-Me-Me-F—F—F-Me-Me-Me-Me-Me-Me-Me-Me-Me-Me,
[0498] First strand (5′-3′): Me-F-Me-Me-Me-F-Me-Me-Me-Me-Me-Me-Me-F-Me-F-Me-Me-Me-F-Me-Me-Me:

[0499] Or Modification pattern 5:
[0500] Second strand (5′-3′): ia-ia-Me-Me-Me-Me-Me-Me-Me-Me-F—F—F-Me-Me-Me-Me-Me-Me-Me-Me-Me-Me,
[0501] First strand (5′-3′): Me-F-Me-Me-Me-X₁-Me-F—F-Me-Me-Me-Me-F-Me-F-Me-Me-Me-Me-Me-Me-Me, wherein X₁ is a thermally destabilising modification;

[0502] Or Modification pattern 6:
[0503] Second strand (5′-3′): ia-ia-Me-Me-Me-Me-Me-Me-Me-Me-F—F—F-Me-Me-Me-Me-Me-Me-Me-Me-Me-Me,
[0504] First strand (5′-3′): Me-F-Me-F-Me-F-Me-F—F-Me-Me-Me-Me-F-Me-F-Me-Me-Me-Me-Me-Me-Me:

[0505] Or Modification pattern 7:
[0506] Second strand (5′-3′): ia-ia-Me-Me-Me-Me-Me-Me-Me-Me-F—F—F-Me-Me-Me-Me-Me-Me-Me-Me-Me-Me,
[0507] First strand (5′-3′): Me-F-Me-Me-Me-F-Me-F—F-Me-Me-Me-Me-F-Me-F-Me-F-Me-Me-Me-Me-Me;

[0508] Or Modification pattern 8:
[0509] Second strand (5′-3′): ia-ia-Me-Me-Me-Me-Me-Me-Me-Me-F—F—F-Me-Me-Me-Me-Me-Me-Me-Me-Me-Me,
[0510] First strand (5′-3′): Me-F-Me-Me-Me-F-Me-F—F-Me-Me-Me-Me-F-Me-F-Me-Me-Me-F-Me-Me-Me
[0511] wherein ia represents an inverted abasic nucleoside.

[0512] Further preferred modifications are as follows:

[0513] Modification pattern 1:
[0514] Second strand (5′-3′): ia-ia-Me(s)Me(s)Me-Me-Me-Me-Me-Me-F—F—F-Me-Me-Me-Me-Me-Me-Me-Me-Me-Me,
[0515] First strand (5′-3′): Me(s)F(s)Me-Me-Me-X₁-Me-Me-Me-Me-Me-Me-Me-F-Me-F-Me-Me-Me-Me-Me(s)Me(s)Me, wherein X₁ is a thermally destabilising modification;

[0516] Or Modification pattern 2:
[0517] Second strand (5′-3′): ia-ia-Me(s)Me(s)Me-Me-Me-Me-Me-Me-F—F—F-Me-Me-Me-Me-Me-Me-Me-Me-Me-Me,
[0518] First strand (5′-3′): Me(s)F(s)Me-F-Me-F-Me-Me-Me-Me-Me-Me-Me-F-Me-F-Me-Me-Me-Me-Me(s)Me(s)Me;

[0519] Or Modification pattern 3:
[0520] Second strand (5′-3′): ia-ia-Me(s)Me(s)Me-Me-Me-Me-Me-Me-F—F—F-Me-Me-Me-Me-Me-Me-Me-Me-Me-Me,
[0521] First strand (5′-3′): Me(s)F(s)Me-Me-Me-F-Me-Me-Me-Me-Me-Me-Me-F-Me-F-Me-F-Me-Me-Me(s)Me(s)Me:

[0522] Or Modification pattern 4:
[0523] Second strand (5′-3′): ia-ia-Me(s)Me(s)Me-Me-Me-Me-Me-Me-F—F—F-Me-Me-Me-Me-Me-Me-Me-Me-Me-Me,
[0524] First strand (5′-3′): Me(s)F(s)Me-Me-Me-F-Me-Me-Me-Me-Me-Me-Me-F-Me-F-Me-Me-Me-F-Me(s)Me(s)Me:

[0525] Or Modification pattern 5:
[0526] Second strand (5′-3′): ia-ia-Me(s)Me(s)Me-Me-Me-Me-Me-Me-F—F—F-Me-Me-Me-Me-Me-Me-Me-Me-Me-Me,
[0527] First strand (5′-3′): Me(s)F(s)Me-Me-Me-X₁-Me-F—F-Me-Me-Me-Me-F-Me-F-Me-Me-Me-Me-Me(s)Me(s)Me, wherein X₁ is a thermally destabilising modification;

[0528] Or Modification pattern 6:
[0529] Second strand (5′-3′): ia-ia-Me(s)Me(s)Me-Me-Me-Me-Me-Me-F—F—F-Me-Me-Me-Me-Me-Me-Me-Me-Me-Me,
[0530] First strand (5′-3′): Me(s)F(s)Me-F-Me-F-Me-F—F-Me-Me-Me-Me-F-Me-F-Me-Me-Me-Me-Me(s)Me(s)Me:

[0531] Or Modification pattern 7:
[0532] Second strand (5′-3′): ia-ia-Me(s)Me(s)Me-Me-Me-Me-Me-Me-F—F—F-Me-Me-Me-Me-Me-Me-Me-Me-Me-Me,
[0533] First strand (5′-3′): Me(s)F(s)Me-Me-Me-F-Me-F—F-Me-Me-Me-Me-F-Me-F-Me-F-Me-Me-Me(s)Me(s)Me:

[0534] Or Modification pattern 8:
[0535] Second strand (5′-3′): ia-ia-Me(s)Me(s)Me-Me-Me-Me-Me-Me-F—F—F-Me-Me-Me-Me-Me-Me-Me-Me-Me-Me,
[0536] First strand (5′-3′): Me(s)F(s)Me-Me-Me-F-Me-F—F-Me-Me-Me-Me-F-Me-F-Me-Me-Me-F-Me(s)Me(s)Me:
[0537] wherein(s) is a phosphorothioate internucleoside linkage and ia represents an inverted abasic nucleoside.

### Conjugation

[0538] Another modification of the nucleic acid e.g. RNA e.g. an siRNA of the invention involves linking the nucleic acid e.g. the siRNA to one or more ligand moieties e.g. to enhance the activity, cellular distribution, or cellular uptake of the nucleic acid e.g. siRNA e.g. into a cell.

[0539] In some embodiments, the ligand moiety described can be attached to a nucleic acid, e.g., an siRNA oligonucleoside, via a linker that can be cleavable or non-cleavable. The term “linker” or “linking group” means an organic moiety that connects two parts of a compound, e.g., covalently attaches two parts of a compound.

[0540] The ligand can be attached to the 3′ or 5′ end of the sense strand.

[0541] The ligand is preferably conjugated to 3′ end of the sense strand of the nucleic acid e.g. an siRNA agent.

[0542] The invention therefore relates in a further aspect to a conjugate for inhibiting expression of a target gene in a cell, said conjugate comprising a nucleic acid portion and one or more ligand moieties, said nucleic acid portion comprising a nucleic acid as disclosed herein.

[0543] In one aspect the second strand of the nucleic acid is conjugated directly or indirectly (e.g. via a linker) to the one or more ligand moiety(s), wherein said ligand moiety is typically present at a terminal region of the second strand, preferably at the 3′ terminal region thereof.

[0544] In certain embodiments, the ligand moiety comprises a GalNAc or GalNAc derivative attached to the nucleic acid e.g. dsiRNA through a linker.

[0545] Therefore the invention relates to a conjugate wherein the ligand moiety comprises
[0546] i) one or more GalNAc ligands; and/or
[0547] ii) one or more GalNAc ligand derivatives; and/or
[0548] iii) one or more GalNAc ligands conjugated to said nucleic acid through a linker.

[0549] Said GalNAc ligand may be conjugated directly or indirectly to the 5′ or 3′ terminal region of the second strand of the nucleic acid, preferably at the 3′ terminal region thereof.

[0550] GalNAc ligands are well known in the art and described in, inter alia, EP3775207A1.

[0551] In some embodiments, the GalNAc ligand is comprised in any one of the linkers shown in FIGS. 1-4 or FIG. 5 (Formula XI), wherein the “oligonucleotide” may be any nucleic acid disclosed herein. Accordingly, the “oligonucleotide” may comprise other bonds than a phosphodiester bond, such as one or more phosphorothioate bonds. Preferably, the nucleic acid according to the invention is a double stranded oligonucleoside as defined herein and the linker is conjugated to the second strand, more preferably to the 3′ terminal region of the second strand, via a phosphodiester bond.

[0552] In some embodiments, the GalNAc ligand is comprised in the linker shown in FIG. 3, wherein the “oligonucleotide” may be any nucleic acid disclosed herein. Accordingly, the “oligonucleotide” may comprise other bonds than a phosphodiester bond, such as one or more phosphorothioate bonds. Preferably, the nucleic acid according to the invention is a double stranded oligonucleoside as defined herein and the linker is conjugated to the second strand, more preferably to the 3′ terminal region of the second strand, via a phosphodiester bond.

[0553] In some embodiments, the GalNAc ligand is comprised in the linker shown in FIG. 5 (Formula XI), wherein the “oligonucleotide” may be any nucleic acid disclosed herein. Accordingly, the “oligonucleotide” may comprise other bonds than a phosphodiester bond, such as one or more phosphorothioate bonds. Preferably, the nucleic acid according to the invention is a double stranded oligonucleoside as defined herein and the linker is conjugated to the second strand, more preferably to the 3′ terminal region of the second strand, via a phosphodiester bond.

[0554] In some embodiments, the GalNAc ligand is comprised in any one of the linkers shown in FIGS. 1-4 or FIG. 5 (Formula XI), wherein the “oligonucleotide” represents a nucleic acid according to the invention, wherein the nucleic acid according to the invention comprises a modified or unmodified second strand comprising or consisting of SEQ ID NO: 265 or SEQ ID NO: 268, preferably wherein the linker is conjugated to the 3′ terminal region of the second strand, i.e., to the 3′ terminal region of SEQ ID NO: 265 or SEQ ID NO: 268, via a phosphodiester bond.

[0555] In some embodiments, the GalNAc ligand is comprised in the linker shown in FIG. 3, wherein the “oligonucleotide” represents a nucleic acid according to the invention, wherein the nucleic acid according to the invention comprises a modified or unmodified second strand comprising or consisting of SEQ ID NO: 265 or SEQ ID NO: 268, preferably wherein the linker is conjugated to the 3′ terminal region of the second strand, i.e., to the 3′ terminal region of SEQ ID NO: 265 or SEQ ID NO: 268, via a phosphodiester bond.

[0556] In some embodiments, the GalNAc ligand is comprised in the linker shown in FIG. 5 (Formula XI), wherein the “oligonucleotide” represents a nucleic acid according to the invention, wherein the nucleic acid according to the invention comprises a modified or unmodified second strand comprising or consisting of SEQ ID NO: 265 or SEQ ID NO: 268, preferably wherein the linker is conjugated to the 3′ terminal region of the second strand, i.e., to the 3′ terminal region of SEQ ID NO: 265 or SEQ ID NO: 268, via a phosphodiester bond.

[0557] In some embodiments, the GalNAc ligand is comprised in any one of the linkers shown in FIGS. 1-4 or FIG. 5 (Formula XI), wherein the “oligonucleotide” represents a nucleic acid according to the invention, wherein the nucleic acid according to the invention comprises a modified second strand comprising or consisting of SEQ ID NO: 774 or SEQ ID NO: 776, preferably wherein the linker is conjugated to the 3′ terminal region of the second strand, i.e., to the 3′ terminal region of SEQ ID NO: 774 or SEQ ID NO: 776, via a phosphodiester bond.

[0558] In some embodiments, the GalNAc ligand is comprised in the linker shown in FIG. 3, wherein the “oligonucleotide” represents a nucleic acid according to the invention, wherein the nucleic acid according to the invention comprises a modified second strand comprising or consisting of SEQ ID NO: 774 or SEQ ID NO: 776, preferably wherein the linker is conjugated to the 3′ terminal region of the second strand, i.e., to the 3′ terminal region of SEQ ID NO: 774 or SEQ ID NO: 776, via a phosphodiester bond.

[0559] In some embodiments, the GalNAc ligand is comprised in the linker shown in FIG. 5 (Formula XI), wherein the “oligonucleotide” represents a nucleic acid according to the invention, wherein the nucleic acid according to the invention comprises a modified second strand comprising or consisting of SEQ ID NO: 774 or SEQ ID NO: 776, preferably wherein the linker is conjugated to the 3′ terminal region of the second strand, i.e., to the 3′ terminal region of SEQ ID NO: 774 or SEQ ID NO: 776, via a phosphodiester bond.

[0560] In some embodiments, the GalNAc ligand is comprised in any one of the linkers shown in FIGS. 1-4 or FIG. 5 (Formula XI), wherein the “oligonucleotide” represents a nucleic acid according to the invention, wherein the nucleic acid according to the invention comprises a modified first strand comprising or consisting of SEQ ID NO: 764 and a modified second strand comprising or consisting of SEQ ID NO: 774, preferably wherein the linker is conjugated to the 3′ terminal region of the second strand, i.e., to the 3′ terminal region of SEQ ID NO: 774, via a phosphodiester bond.

[0561] In some embodiments, the GalNAc ligand is comprised in the linker shown in FIG. 3, wherein the “oligonucleotide” represents a nucleic acid according to the invention, wherein the nucleic acid according to the invention comprises a modified first strand comprising or consisting of SEQ ID NO: 764 and a modified second strand comprising or consisting of SEQ ID NO: 774, preferably wherein the linker is conjugated to the 3′ terminal region of the second strand, i.e., to the 3′ terminal region of SEQ ID NO: 774, via a phosphodiester bond.

[0562] In some embodiments, the GalNAc ligand is comprised in the linker shown in FIG. 5 (Formula XI), wherein the “oligonucleotide” represents a nucleic acid according to the invention, wherein the nucleic acid according to the invention comprises a modified first strand comprising or consisting of SEQ ID NO: 764 and a modified second strand comprising or consisting of SEQ ID NO: 774, preferably wherein the linker is conjugated to the 3′ terminal region of the second strand, i.e., to the 3′ terminal region of SEQ ID NO: 774, via a phosphodiester bond.

[0563] In some embodiments, the GalNAc ligand is comprised in any one of the linkers shown in FIGS. 1-4 or FIG. 5 (Formula XI), wherein the “oligonucleotide” represents a nucleic acid according to the invention, wherein the nucleic acid according to the invention comprises a modified first strand comprising or consisting of SEQ ID NO: 766 and a modified second strand comprising or consisting of SEQ ID NO: 776, preferably wherein the linker is conjugated to the 3′ terminal region of the second strand, i.e., to the 3′ terminal region of SEQ ID NO: 776, via a phosphodiester bond.

[0564] In some embodiments, the GalNAc ligand is comprised in the linker shown in FIG. 3, wherein the “oligonucleotide” represents a nucleic acid according to the invention, wherein the nucleic acid according to the invention comprises a modified first strand comprising or consisting of SEQ ID NO: 766 and a modified second strand comprising or consisting of SEQ ID NO: 776, preferably wherein the linker is conjugated to the 3′ terminal region of the second strand, i.e., to the 3′ terminal region of SEQ ID NO: 776, via a phosphodiester bond.

[0565] In some embodiments, the GalNAc ligand is comprised in the linker shown in FIG. 5 (Formula XI), wherein the “oligonucleotide” represents a nucleic acid according to the invention, wherein the nucleic acid according to the invention comprises a modified first strand comprising or consisting of SEQ ID NO: 766 and a modified second strand comprising or consisting of SEQ ID NO: 776, preferably wherein the linker is conjugated to the 3′ terminal region of the second strand, i.e., to the 3′ terminal region of SEQ ID NO: 776, via a phosphodiester bond.

[0566] In some embodiments, the GalNAc ligand is comprised in the linker shown in FIG. 3, wherein the “oligonucleotide” represents a nucleic acid according to the invention, wherein the nucleic acid according to the invention comprises a modified first strand comprising or consisting of SEQ ID NO: 764 and a modified second strand comprising or consisting of SEQ ID NO: 774, wherein the second strand has the following structure:

[chemical structure]

[0567] wherein:
[0568] T represents a 2′Me ribose modification,
[0569] B represents the nucleoside bases of the first two basic nucleosides in the 5′ terminal region of SEQ ID NO: 774, and
[0570] Z represents the remaining 19 contiguous basic nucleosides of SEQ ID NO: 774.

[0571] In some embodiments, the GalNAc ligand is comprised in the linker shown in FIG. 5 (Formula XI), wherein the “oligonucleotide” represents a nucleic acid according to the invention, wherein the nucleic acid according to the invention comprises a modified first strand comprising or consisting of SEQ ID NO: 764 and a modified second strand comprising or consisting of SEQ ID NO: 774, wherein the second strand has the following structure:

[chemical structure]

[0572] wherein:
[0573] T represents a 2′Me ribose modification,
[0574] B represents the nucleoside bases of the first two basic nucleosides in the 5′ terminal region of SEQ ID NO: 774, and
[0575] Z represents the remaining 19 contiguous basic nucleosides of SEQ ID NO: 774.

[0576] In some embodiments, the GalNAc ligand is comprised in the linker shown in FIG. 3, wherein the “oligonucleotide” represents a nucleic acid according to the invention, wherein the nucleic acid according to the invention comprises a modified first strand comprising or consisting of SEQ ID NO: 766 and a modified second strand comprising or consisting of SEQ ID NO: 776, wherein the second strand has the following structure:

[chemical structure]

[0577] wherein:
[0578] T represents a 2′Me ribose modification,
[0579] B represents the nucleoside bases of the first two basic nucleosides in the 5′ terminal region of SEQ ID NO: 776, and
[0580] Z represents the remaining 19 contiguous basic nucleosides of SEQ ID NO: 776.

[0581] In some embodiments, the GalNAc ligand is comprised in the linker shown in FIG. 5 (Formula XI), wherein the “oligonucleotide” represents a nucleic acid according to the invention, wherein the nucleic acid according to the invention comprises a modified first strand comprising or consisting of SEQ ID NO: 766 and a modified second strand comprising or consisting of SEQ ID NO: 776, wherein the second strand has the following structure:

[chemical structure]

[0582] wherein:
[0583] T represents a 2′Me ribose modification,
[0584] B represents the nucleoside bases of the first two basic nucleosides in the 5′ terminal region of SEQ ID NO: 776, and
[0585] Z represents the remaining 19 contiguous basic nucleosides of SEQ ID NO: 776.

### Vector and Cell

[0586] In one aspect, the invention provides a cell containing a nucleic acid, such as inhibitory RNA [RNAi] as described herein.

[0587] In one aspect, the invention provides a cell comprising a vector as described herein.

### Pharmaceutically Acceptable Compositions

[0588] In one aspect, the invention provides a pharmaceutical composition for inhibiting expression of a target gene, the composition comprising a nucleic acid as disclosed herein.

[0589] The pharmaceutically acceptable composition may comprise an excipient and or carrier.

[0590] Some examples of materials which can serve as pharmaceutically-acceptable carriers include: (1) sugars, such as lactose, glucose and sucrose: (2) starches, such as corn starch and potato starch: (3) cellulose, and its derivatives, such as sodium carboxymethyl cellulose, ethyl cellulose and cellulose acetate: (4) powdered tragacanth: (5) malt: (6) gelatin: (7) lubricating agents, such as magnesium stearate, sodium lauryl sulfate and talc: (8) excipients, such as cocoa butter and suppository waxes: (9) oils, such as peanut oil, cottonseed oil, safflower oil, sesame oil, olive oil, corn oil and soybean oil: (10) glycols, such as propylene glycol: (11) polyols, such as glycerin, sorbitol, mannitol and polyethylene glycol: (12) esters, such as ethyl oleate and ethyl laurate: (13) agar: (14) buffering agents, such as magnesium hydroxide and aluminum hydroxide: (15) alginic acid: (16) pyrogen-free water: (17) isotonic saline: (18) Ringer's solution: (19) ethyl alcohol: (20) pH buffered solutions: (21) polyesters, polycarbonates and/or poly anhydrides: (22) bulking agents, such as polypeptides and amino acids (23) serum component, such as serum albumin, HDL and LDL; and (22) other non-toxic compatible substances employed in pharmaceutical formulations.

[0591] Typical pharmaceutical carriers include, but are not limited to, binding agents (e.g., pregelatinized maize starch, polyvinylpyrrolidone or hydroxypropyl methylcellulose, etc.): fillers (e.g., lactose and other sugars, microcrystalline cellulose, pectin, gelatin, calcium sulfate, ethyl cellulose, polyacrylates or calcium hydrogen phosphate, etc.): lubricants (e.g., magnesium stearate, talc, silica, colloidal silicon dioxide, stearic acid, metallic stearates, hydrogenated vegetable oils, corn starch, polyethylene glycols, sodium benzoate, sodium acetate, etc.): disintegrants (e.g., starch, sodium starch glycolate, etc.); and wetting agents (e.g., sodium lauryl sulphate, etc.).

[0592] Pharmaceutically acceptable organic or inorganic excipients suitable for non-parenteral administration which do not deleteriously react with nucleic acids can also be used to formulate the compositions of the present invention. Suitable pharmaceutically acceptable excipients include, but are not limited to, water, salt solutions, alcohols, polyethylene glycols, gelatin, lactose, amylose, magnesium stearate, talc, silicic acid, viscous paraffin, hydroxymethylcellulose, polyvinylpyrrolidone, and the like.

[0593] Formulations for topical administration of nucleic acids can include sterile and non-sterile aqueous solutions, non-aqueous solutions in common solvents such as alcohols, or solutions of the nucleic acids in liquid or solid oil bases. The solutions can also contain buffers, diluents and other suitable additives. Pharmaceutically acceptable organic or inorganic excipients suitable for non-parenteral administration which do not deleteriously react with nucleic acids can be used.

[0594] In one embodiment, the nucleic acid or composition is administered in an unbuffered solution. In certain embodiments, the unbuffered solution is saline or water. In other embodiments, the nucleic acid e.g. siRNA agent is administered in a buffered solution. In such embodiments, the buffer solution can comprise acetate, citrate, prolamine, carbonate, or phosphate, or any combination thereof. For example, the buffer solution can be phosphate buffered saline (PBS).

### Dosages

[0595] The pharmaceutical compositions of the invention may be administered in dosages sufficient to inhibit expression of a gene. In general, a suitable dose of a nucleic acid e.g. an siRNA of the invention will be in the range of about 0.001 to about 200.0 milligrams per kilogram body weight of the recipient per day, generally in the range of about 1 to 50 mg per kilogram body weight per day. Typically, a suitable dose of a nucleic acid e.g. an siRNA of the invention will be in the range of about 0.1 mg/kg to about 5.0 mg/kg. e.g., about 0.3 mg/kg and about 3.0 mg/kg.

[0596] A repeat-dose regimen may include administration of a therapeutic amount of a nucleic acid e.g. siRNA on a regular basis, such as every other day or once a year. In certain embodiments, the nucleic acid e.g. siRNA is administered about once per month to about once per quarter (i.e., about once every three months).

[0597] In various embodiments, the nucleic acid e.g. siRNA agent is administered at a dose of about 0.01 mg/kg to about 10 mg/kg or about 0.5 mg/kg to about 50 mg/kg. In some embodiments, the nucleic acid e.g. siRNA agent is administered at a dose of about 10 mg/kg to about 30 mg/kg. In certain embodiments, the nucleic acid e.g. siRNA agent is administered at a dose selected from about 0.5 mg/kg 1 mg/kg. 1.5 mg/kg. 3 mg/kg. 5 mg/kg. 10 mg/kg, and 30) mg/kg. In certain embodiments, the nucleic acid e.g. agent is administered about once per week. once per month, once every other two months, or once a quarter (i.e., once every three months) at a dose of about 0.1 mg/kg to about 5.0 mg/kg. In certain embodiments, the nucleic acid e.g. siRNA agent is administered to the subject once a week. In certain embodiments, the nucleic acid e.g. siRNA agent is administered to the subject once a month. In certain embodiments, the nucleic acid e.g. siRNA agent is administered once per quarter (i.e., every three months).

[0598] After an initial treatment regimen, the treatments can be administered on a less frequent basis. For example, after administration weekly or biweekly for three months, administration can be repeated once per month, for six months, or a year: or longer.

[0599] The pharmaceutical composition can be administered once daily, or administered as two, three, or more sub-doses at appropriate intervals throughout the day or even using continuous infusion or delivery through a controlled release formulation. In that case, the nucleic acid e.g. siRNA contained in each sub-dose must be correspondingly smaller in order to achieve the total daily dosage. The dosage unit can also be compounded for delivery over several days, e.g., using a conventional sustained release formulation which provides sustained release of the nucleic acid e.g. siRNA over a several day period. Sustained release formulations are well known in the art and are particularly useful for delivery of agents at a particular site, such as could be used with the agents of the present invention. In this embodiment, the dosage unit contains a corresponding multiple of the daily dose.

[0600] In other embodiments, a single dose of the pharmaceutical compositions can be long lasting, such that subsequent doses are administered at not more than 3, 4, or 5 day intervals, or at not more than 1, 2, 3, or 4 week intervals. In some embodiments of the invention, a single dose of the pharmaceutical compositions of the invention is administered once per week. In other embodiments of the invention, a single dose of the pharmaceutical compositions of the invention is administered bimonthly. In certain embodiments, the siRNA is administered about once per month to about once per quarter (i.e., about once every three months), or even every 6 months or 12 months.

[0601] Estimates of effective dosages and in vivo half-lives for the individual nucleic acid e.g. siRNAs encompassed by the invention can be made using conventional methodologies or on the basis of in vivo testing using an appropriate animal model, as known in the art.

[0602] The pharmaceutical compositions of the present invention can be administered in a number of ways depending upon whether local or systemic treatment is desired and upon the area to be treated. Administration can be topical (e.g., by a transdermal patch), pulmonary, e.g., by inhalation or insufflation of powders or aerosols, including by nebulizer: intratracheal, intranasal, epidermal and transdermal, oral or parenteral. Parenteral administration includes intravenous, intraarterial, subcutaneous, intraperitoneal, or intramuscular injection or infusion: subdermal, e.g., via an implanted device: or intracranial, e.g., by intraparenchymal, intrathecal or intraventricular administration. In certain preferred embodiments, the compositions are administered by intravenous infusion or injection. In certain embodiments, the compositions are administered by subcutaneous injection.

[0603] In one embodiment, the nucleic acid e.g. agent is administered to the subject subcutaneously.

[0604] The nucleic acid e.g. siRNA can be delivered in a manner to target a particular tissue (e.g. in particular liver cells).

### Methods for Inhibiting ZPI Gene Expression

[0605] The present invention also provides methods of inhibiting expression of ZPI gene in a cell. The methods include contacting a cell with a nucleic acid of the invention e.g. siRNA agent, such as double stranded siRNA agent, in an amount effective to inhibit expression of the ZPI gene in the cell, thereby inhibiting expression of the ZPI gene in the cell. It is to be noted that a nucleic acid “for inhibiting the expression of ZPI” is a nucleic acid that is capable of inhibiting ZPI expression, preferably as described herein below.

[0606] Contacting of a cell with the nucleic acid e.g. an siRNA, such as a double stranded siRNA agent, may be done in vitro or in vivo. Contacting a cell in vivo with nucleic acid e.g. includes contacting a cell or group of cells within a subject, e.g., a human subject, with the nucleic acid e.g. siRNA. Combinations of in vitro and in vivo methods of contacting a cell are also possible. Contacting a cell may be direct or indirect, as discussed above. Furthermore, contacting a cell may be accomplished via a targeting ligand moiety, including any ligand moiety described herein or known in the art. In preferred embodiments, the targeting ligand moiety is a carbohydrate moiety, e.g. a GalNAc3 ligand, or any other ligand moiety that directs the siRNA agent to a site of interest.

[0607] The term “inhibiting,” as used herein, is used interchangeably with “reducing,” “silencing,” “downregulating”, “suppressing”, and other similar terms, and includes any level of inhibition.

[0608] In some embodiments of the methods of the invention, expression of ZPI gene is inhibited by at least 30%, 35%, 40%, 45%, 50%, 55%, 60%, 65%, 70%, 75%, 80%, 85%, 90%, or 95%, or to below the level of detection of the assay, preferably when determined by qPCR as described herein and/or when the siRNA is introduced into the target cell by transfection. In certain embodiments, the methods include a clinically relevant inhibition of expression of ZPI target gene e.g. as demonstrated by a clinically relevant outcome after treatment of a subject with an agent to reduce the expression of the gene.

[0609] In some embodiments, when transfected into the cells, the nucleic acid of the invention inhibits expression of the ZPI gene with an IC50 value lower than 2500 pM, 2400 pM, 2300 pM, 2200 pM, 2100 pM, 2000 pM, 1900 pM, 1800 pM, 1700 pM, 1600 pM, 1500 pM, 1400 pM, 1300 pM, 1200 pM, 1100 pM, 1000 pM, 900 pM, 800 pM, 700 pM, 600 pM, 500 pM, 400 pM, 300 pM, 200 pM or 100 pM, preferably when determined by qPCR, more preferably by reverse transcriptase (RT)-qPCR, as described herein.

[0610] In a preferred embodiment, when transfected into the cells, the nucleic acid of the invention inhibits expression of the ZPI gene with an IC50 value lower than 2500 pM. In a more preferred embodiment, when transfected into the cells, the nucleic acid of the invention inhibits expression of the ZPI gene with an IC50 value lower than 1000 pM. In an even more preferred embodiment, when transfected into the cells, the nucleic acid of the invention inhibits expression of the ZPI gene with an IC50 value lower than 500 pM. In a most preferred embodiment, when transfected into the cells, the nucleic acid of the invention inhibits expression of the ZPI gene with an IC50 value lower than 100 pM.

[0611] Inhibition of expression of the ZPI gene may be quantified by the following method:

[0612] Huh7 cells (human hepatocyte-derived cell line, obtained from JCRB Cell Bank) may be maintained in Dulbecco's Modified Eagle Medium (DMEM) supplemented with 10% FBS at 37° C. in an atmosphere of 5% CO₂. Cells may then be transfected with siRNA duplexes targeting ZPI mRNA or a negative control siRNA (siRNA-control: sense strand 5′-UUCUCCGAACGUGUCACGUTT-3′ (SEQ ID NO: 794), antisense strand 5′-ACGUGACACGUUCGGAGAATT-3′ (SEQ ID NO: 790)) using 10×3-fold serial dilutions over a final duplex concentration range of 20 nM to 1 pM. Transfection may be carried out by adding 9.7 μL Opti-MEM (ThermoFisher) plus 0.3 μL Lipofectamine RNAiMAX (ThermoFisher) to 10 μL of each siRNA duplex. The mixture may be incubated at room temperature for 15 minutes before being added to 100 μL of complete growth medium containing 20,000 Huh7 cells. Cells may be incubated for 24 hours at 37° C./5% CO₂ prior to total RNA purification using a RNeasy 96 Kit (Qiagen). Each duplex may be tested by transfection in duplicate wells in a single experiment.

[0613] cDNA synthesis may be performed using FastQuant RT (with gDNase) Kit (Tiangen). Real-time quantitative PCR (qPCR) may be performed on an ABI Prism 7900HT or ABI QuantStudio 7 with primers specific for human ZPI (Hs01547819_m1) and human GAPDH (Hs02786624_g1) using FastStart Universal Probe Master Kit (Roche).

[0614] qPCR may be performed in duplicate on cDNA derived from each well and the mean cycle threshold (Ct) calculated. Relative ZPI expression may be calculated from mean Ct values using the comparative Ct (ΔΔCt) method, normalised to GAPDH and relative to untreated cells. Maximum percent inhibition of ZPI expression and IC50 values may be calculated using a four parameter (variable slope) model using GraphPad Prism 9.

[0615] Alternatively or in addition, inhibition of expression of the ZPI gene may be characterized by a reduction of mean relative expression of the ZPI gene.

[0616] In some embodiments, when cells are transfected with 0.1 nM of the nucleic acid of the invention, the mean relative expression of ZPI is below 1, 0.9, 0.8, 0.7, 0.6, 0.5, or 0.4, preferably when determined by qPCR, more preferably by reverse transcriptase (RT)-qPCR, as described herein.

[0617] In some embodiments, when cells are transfected with 5 nM of the nucleic acid of the invention, the mean relative expression of ZPI is below 1, 0.9, 0.8, 0.7, 0.6, 0.5, 0.4 or 0.3, preferably when determined by qPCR, more preferably by reverse transcriptase (RT)-qPCR, as described herein.

[0618] Mean relative expression of the ZPI gene may be quantified by the following method:

[0619] Huh7 cells (human hepatocyte-derived cell line, obtained from JCRB Cell Bank) may be maintained in Dulbecco's Modified Eagle Medium (DMEM) supplemented with 10% FBS at 37° C. in at atmosphere of 5% CO₂. Cells may be transfected with siRNA duplexes targeting ZPI mRNA or a negative control siRNA (siRNA-control: sense strand 5′-UUCUCCGAACGUGUCACGUTT-3′ (SEQ ID NO: 794), antisense strand 5′-ACGUGACACGUUCGGAGAATT-3′ (SEQ ID NO: 790)) at a final duplex concentration of 5 nM and 0.1 nM. Transfection may be carried out by adding 9.7 μL Opti-MEM (ThermoFisher) plus 0.3 μL Lipofectamine RNAiMAX (ThermoFisher) to 10 μL of each siRNA duplex. The mixture may be incubated at room temperature for 15 minutes before being added to 100 μL of complete growth medium containing 20,000 Huh7 cells. Cells may be incubated for 24 hours at 37° C./5% CO₂ prior to total RNA purification using a RNeasy 96 Kit (Qiagen). Each duplex may be tested by transfection in duplicate wells in two independent experiments.

[0620] cDNA synthesis may be performed using FastQuant RT (with gDNase) Kit (Tiangen). Real-time quantitative PCR (qPCR) may be performed on an ABI Prism 7900HT or ABI QuantStudio 7 with primers specific for human ZPI (Hs01547819_m1) and human GAPDH (Hs02786624_g1) using FastStart Universal Probe Master Kit (Roche).

[0621] qPCR may be performed in duplicate on cDNA derived from each well and the mean Ct calculated. Relative ZPI expression may be calculated from mean Ct values using the comparative Ct (ΔΔCt) method, normalised to GAPDH and relative to untreated cells.

[0622] Inhibition of the expression of ZPI gene may be manifested by a reduction of the amount of mRNA of the target ZPI gene in comparison to a suitable control.

[0623] In other embodiments, inhibition of the expression of ZPI gene may be assessed in terms of a reduction of a parameter that is functionally linked to gene expression, e.g., protein expression or signaling pathways.

Methods of Treating or Preventing Diseases Associated with ZPI Gene Expression

[0624] The present invention also provides methods of using nucleic acid e.g. an siRNA of the invention or a composition containing nucleic acid e.g. an siRNA of the invention to reduce or inhibit ZPI gene expression in a cell. The methods include contacting the cell with a nucleic acid e.g., dsiRNA of the invention and maintaining the cell for a time sufficient to obtain degradation of the mRNA transcript of ZPI, thereby inhibiting expression of the ZPI gene in the cell. Reduction in gene expression can be assessed by any methods known in the art.

[0625] In the methods of the invention the cell may be contacted in vitro or in vivo, i.e., the cell may be within a subject.

[0626] A cell suitable for treatment using the methods of the invention may be any cell that expresses a gene of interest associated with disease related to a disorder of haemostasis, such as a disease related to a disorder of haemostasis, such as haemophilia.

[0627] The in vivo methods of the invention may include administering to a subject a composition containing a nucleic acid of the invention, e.g., an siRNA, where the nucleic acid, e.g., siRNA includes a nucleoside sequence that is complementary to at least a part of an RNA transcript of ZPI gene of the mammal to be treated.

[0628] The present invention further provides methods of treatment of a subject in need thereof. The treatment methods of the invention include administering a nucleic acid such as an siRNA of the invention to a subject, e.g., a subject that would benefit from a reduction or inhibition of the expression of ZPI gene, in a therapeutically effective amount e.g. a nucleic acid such as an siRNA targeting ZPI or a pharmaceutical composition comprising the nucleic acid targeting ZPI. The disease to be treated is related to a disorder of haemostasis, such as a disease related to a disorder of haemostasis, such as haemophilia.

[0629] Haemophilia, or hemophilia is a mostly inherited genetic disorder that impairs the body's ability to make blood clots, a process needed to stop bleeding. This results in subjects bleeding for a longer time after an injury, easy bruising, and an increased risk of bleeding inside joints or the brain. Subjects with a mild case of the disease may have symptoms only after an accident or during surgery. Bleeding into a joint, also referred to as haemarthrosis, can result in permanent damage while bleeding in the brain can result in long term headaches, seizures, or a decreased level of consciousness.

[0630] There are two main types of haemophilia: haemophilia A, which occurs due to low amounts of clotting factor VIII, and haemophilia B, which occurs due to low levels of clotting factor IX. They are typically inherited from one's parents through an X chromosome carrying a nonfunctional gene. Rarely a new mutation may occur during early development or haemophilia may develop later in life due to antibodies forming against a clotting factor. Other types include haemophilia C, which occurs due to low levels of factor XI, Von Willebrand disease, which occurs due to low levels of a substance called von Willebrand factor, and parahaemophilia, which occurs due to low levels of factor V. Haemophilia A, B, and C prevent the intrinsic pathway from functioning properly: this clotting pathway is necessary when there is damage to the endothelium of a blood vessel. Acquired haemophilia is associated with cancers, autoimmune disorders, and pregnancy. Diagnosis is by testing the blood for its ability to clot and its levels of clotting factors.

[0631] In certain embodiments, the nucleic acid of the present invention is suitable for treatment, or for treatment of haemophilia A, B and/or C. In certain embodiments, the nucleic acid of the present invention is suitable for treatment, or for treatment of haemophilia A and/or B. In certain embodiments, the nucleic acid of the present invention is suitable for treatment, or for treatment of acquired haemophilia. In certain embodiments, the nucleic acid of the present invention is suitable for treatment, or for treatment of Willebrand disease. In certain embodiments, the nucleic acid of the present invention is suitable for treatment, or for treatment of parahaemophilia.

[0632] Without wishing to being bound by theory, treatment with the nucleic acid of the invention results in a boost of clotting factor levels such that bleeding can be reduced or prevented, as demonstrated herein in FIG. 12. Thus, in a preferred embodiment, treatment with the nucleic acid of the invention reduces or prevents bleeding episodes in a subject suffering from haemophilia. In another preferred embodiment, treatment with the nucleic acid of the invention reduces or prevents bleeding into a joint of a subject suffering from haemophilia. In certain embodiments, treatment with the nucleic acid of the invention reduces or prevents bleeding into a muscle or into the brain of a subject suffering from haemophilia.

[0633] Alternatively or in addition, treatment of a subject, preferably a subject having a disorder of haemostasis, such as haemophilia, with the nucleic acid of the invention may result in one or more of more of the following:

[0634] In certain embodiments, treatment of a subject, preferably a subject having a disorder of haemostasis, such as haemophilia, with the nucleic acid of the invention results in reduced bone marrow hyperplasia. As shown in FIG. 14A, treatment of Haem A mice with a nucleic acid of the invention significantly reduced bone marrow hyperplasia in said mice.

[0635] In certain embodiments, treatment of a subject, preferably a subject having a disorder of haemostasis, such as haemophilia, with the nucleic acid of the invention results in reduced osteoarthritis. As shown in FIG. 14B, treatment of Haem A mice with a nucleic acid of the invention significantly reduced osteoarthritis in said mice.

[0636] In certain embodiments, treatment of a subject, preferably a subject having a disorder of haemostasis, such as haemophilia, with the nucleic acid of the invention results in reduced chondrocyte degeneration/necrosis. As shown in FIG. 14C, treatment of Haem A mice with a nucleic acid of the invention significantly reduced chondrocyte degeneration/necrosis in said mice.

[0637] In certain embodiments, treatment of a subject, preferably a subject having a disorder of haemostasis, such as haemophilia, with the nucleic acid of the invention results in reduced haemorrhage. As shown in FIG. 14D, treatment of Haem A mice with a nucleic acid of the invention significantly reduced haemorrhage in said mice.

[0638] In certain embodiments, treatment of a subject, preferably a subject having a disorder of haemostasis, such as haemophilia, with the nucleic acid of the invention results in reduced haemosiderin deposition. As shown in FIG. 14E, treatment of Haem A mice with a nucleic acid of the invention significantly reduced haemosiderin deposition in said mice.

[0639] In certain embodiments, treatment of a subject, preferably a subject having a disorder of haemostasis, such as haemophilia, with the nucleic acid of the invention results in reduced occurrence of haematoma. As shown in FIG. 14F, treatment of Haem A mice with a nucleic acid of the invention significantly reduced haematoma in said mice.

[0640] In certain embodiments, treatment of a subject, preferably a subject having a disorder of haemostasis, such as haemophilia, with the nucleic acid of the invention results in reduced osteoclastogenic bone resorption. As shown in FIG. 14G, treatment of Haem A mice with a nucleic acid of the invention significantly reduced osteoclastogenic bone resorption in said mice.

[0641] In certain embodiments, treatment of a subject, preferably a subject having a disorder of haemostasis, such as haemophilia, with the nucleic acid of the invention results in reduced osteolysis. As shown in FIG. 14H, treatment of Haem A mice with a nucleic acid of the invention significantly reduced osteolysis in said mice.

[0642] In certain embodiments, treatment of a subject, preferably a subject having a disorder of haemostasis, such as haemophilia, with the nucleic acid of the invention results in reduced periostitis. As shown in FIG. 14I, treatment of Haem A mice with a nucleic acid of the invention significantly reduced periostitis in said mice.

[0643] In certain embodiments, treatment of a subject, preferably a subject having a disorder of haemostasis, such as haemophilia, with the nucleic acid of the invention results in reduced sub-chondral bone sclerosis. As shown in FIG. 14J, treatment of Haem A mice with a nucleic acid of the invention significantly reduced sub-chondral bone sclerosis in said mice.

[0644] In certain embodiments, treatment of a subject, preferably a subject having a disorder of haemostasis, such as haemophilia, with the nucleic acid of the invention results in reduced tendon degeneration. As shown in FIG. 14K, treatment of Haem A mice with a nucleic acid of the invention significantly reduced tendon degeneration in said mice.

[0645] In certain embodiments, treatment of a subject, preferably a subject having a disorder of haemostasis, such as haemophilia, with the nucleic acid of the invention results in reduced tendonitis. As shown in FIG. 14L, treatment of Haem A mice with a nucleic acid of the invention significantly reduced tendonitis in said mice.

[0646] In certain embodiments, treatment of a subject, preferably a subject having a disorder of haemostasis, such as haemophilia, with the nucleic acid of the invention results in reduced tenosynovitis. As shown in FIG. 14M, treatment of Haem A mice with a nucleic acid of the invention significantly reduced tenosynovitis in said mice.

[0647] Thus, in a particular embodiment, the invention relates to a nucleic acid suitable for use, or for use, in treatment of haemophilia, wherein the treatment of haemophilia is characterized by reduced bleeding and one or more of: reduced bone marrow hyperplasia, reduced osteoarthritis, reduced chondrocyte degeneration/necrosis, reduced haemorrhage, reduced haemosiderin deposition, reduced haematoma, reduced osteoclastogenic bone resorption, reduced osteolysis, reduced periostitis, reduced sub-chondral bone sclerosis, reduced tendon degeneration, reduced tendonitis, and/or reduced tenosynovitis. An nucleic acid e.g. siRNA of the invention may be administered as a “free” nucleic acid or “free siRNA, administered in the absence of a pharmaceutical composition. The naked nucleic acid may be in a suitable buffer solution. The buffer solution may comprise acetate, citrate, prolamine, carbonate, or phosphate, or any combination thereof. In one embodiment, the buffer solution is phosphate buffered saline (PBS). The pH and osmolarity of the buffer solution can be adjusted such that it is suitable for administering to a subject.

[0648] Alternatively, a nucleic acid e.g. siRNA of the invention may be administered as a pharmaceutical composition, such as a dsiRNA liposomal formulation.

[0649] In one embodiment, the method includes administering a composition featured herein such that expression of ZPI gene is decreased, such as for about 1, 2, 3, 4, 5, 6, 7, 8, 12, 16, 18, 24 hours, 28, 32, or about 36 hours. In one embodiment, expression of ZPI target gene is decreased for an extended duration, e.g., at least about two, three, four days or more, e.g., about one week, two weeks, three weeks, or four weeks or longer, e.g., about 1 month, 2 months, or 3 months.

[0650] Subjects can be administered a therapeutic amount of nucleic acid, e.g., siRNA, such as about 0.01 mg/kg to about 200 mg/kg, so as to treat disease related to a disorder of haemostasis, such as a disease related to a disorder of haemostasis, such as haemophilia.

[0651] The nucleic acid e.g. siRNA can be administered by intravenous infusion over a period of time, on a regular basis. In certain embodiments, after an initial treatment regimen, the treatments can be administered on a less frequent basis. Administration of the siRNA can reduce gene product levels of ZPI target gene, e.g., in a cell or tissue of the patient by at least about 20%, 25%, 30%, 35%, 40%, 45%, 50%, 55%, 60%, 65%, 70%, 75%, 80%, 85%, 90%, or 95%, or below the level of detection of the assay method used. In certain embodiments, administration results in clinical stabilization or preferably clinically relevant reduction of at least one sign or symptom of a ZPI gene-associated disorder.

[0652] Alternatively, the nucleic acid e.g. siRNA can be administered subcutaneously, i.e., by subcutaneous injection. One or more injections may be used to deliver the desired daily dose of nucleic acid e.g. siRNA to a subject. The injections may be repeated over a period of time. The administration may be repeated on a regular basis. In certain embodiments, after an initial treatment regimen, the treatments can be administered on a less frequent basis. A repeat-dose regimen may include administration of a therapeutic amount of nucleic acid on a regular basis, such as every other day or to once a year. In certain embodiments, the nucleic acid is administered about once per month to about once per quarter (i.e., about once every three months).

[0653] In one aspect the present invention may be applied in the compounds, processes, compositions or uses of the following Sentences numbered 1-101 wherein reference to any Formula in the Sentences 1-101 refers only to those Formulas that are defined within Sentences 1-101. These formulae are reproduced in FIG. 5. Specifically, an oligonucleoside moiety as represented by Z in any of the following sentences can comprise a nucleic acid for inhibiting expression of ZPI as defined in any of the claims hereinafter.

1. A compound comprising the following structure:

[chemical structure]

[0654] wherein:
[0655] R₁ at each occurrence is independently selected from the group consisting of hydrogen, methyl and ethyl:
[0656] R₂ is selected from the group consisting of hydrogen, hydroxy, —OC₁₋₃alkyl, —C(═O)OC₁₋₃alkyl, halo and nitro;
[0657] X₁ and X₂ at each occurrence are independently selected from the group consisting of methylene, oxygen and sulfur;
[0658] m is an integer of from 1 to 6;
[0659] n is an integer of from 1 to 10;
[0660] q, r, s, t, v are independently integers from 0 to 4, with the proviso that:
[0661] (i) q and r cannot both be 0 at the same time; and
[0662] (ii) s, t and v cannot all be 0 at the same time;
[0663] Z is an oligonucleoside moiety.
   2. A compound according to Sentence 1, wherein R₁ is hydrogen at each occurrence.
   3. A compound according to Sentence 1, wherein R₁ is methyl.
   4. A compound according to Sentence 1, wherein R₁ is ethyl.
   5. A compound according to any of Sentences 1 to 4, wherein R₂ is hydroxy.
   6. A compound according to any of Sentences 1 to 4, wherein R₂ is halo.
   7. A compound according to Sentence 6, wherein R₂ is fluoro.
   8. A compound according to Sentence 6, wherein R₂ is chloro.
   9. A compound according to Sentence 6, wherein R₂ is bromo.
   10. A compound according to Sentence 6, wherein R₂ is iodo.
   11. A compound according to Sentence 6, wherein R₂ is nitro.
   12. A compound according to any of Sentences 1 to 11, wherein X₁ is methylene.
   13. A compound according to any of Sentences 1 to 11, wherein X₁ is oxygen.
   14. A compound according to any of Sentences 1 to 11, wherein X₁ is sulfur.
   15. A compound according to any of Sentences 1 to 14, wherein X₂ is methylene.
   16. A compound according to any of Sentences 1 to 15, wherein X₂ is oxygen.
   17. A compound according to any of Sentences 1 to 16, wherein X₂ is sulfur.
   18. A compound according to any of Sentences 1 to 17, wherein m=3.
   19. A compound according to any of Sentences 1 to 18, wherein n=6.
   20. A compound according to Sentences 13 and 15, wherein X₁ is oxygen and X₂ is methylene, and preferably wherein:
[0664] q=1,
[0665] r=2,
[0666] s=1,
[0667] t=1,
[0668] v=1.
   21. A compound according to Sentences 12 and 15, wherein both X₁ and X₂ are methylene, and preferably wherein:
[0669] q=1,
[0670] r=3,
[0671] s=1,
[0672] t=1,
[0673] v=1.
   22. A compound according to any of Sentences 1 to 21, wherein Z is:

[chemical structure]

[0674] wherein:
[0675] Z₁, Z₂, Z₃, Z₄ are independently at each occurrence oxygen or sulfur; and
[0676] one the bonds between P and Z₂, and P and Z₃ is a single bond and the other bond is a double bond.
   23. A compound according to Sentence 22, wherein said oligonucleoside is an RNA compound capable of modulating, preferably inhibiting, expression of a target gene.
   24. A compound according to Sentence 23, wherein said RNA compound comprises an RNA duplex comprising first and second strands, wherein the first strand is at least partially complementary to an RNA sequence of a target gene, and the second strand is at least partially complementary to said first strand, and wherein each of the first and second strands have 5′ and 3′ ends.
   25. A compound according to Sentence 24, wherein the RNA compound is attached at the 5′ end of its second strand to the adjacent phosphate.
   26. A compound according to Sentence 24, wherein the RNA compound is attached at the 3′ end of its second strand to the adjacent phosphate.
   27. A compound of Formula (II):

[chemical structure]

28. A compound of Formula (III):

[chemical structure]

29. A compound according to Sentence 27 or 28, wherein the oligonucleoside comprises an RNA duplex comprising first and second strands, wherein the first strand is at least partially complementary to an RNA sequence of a target gene, and the second strand is at least partially complementary to said first strand, and wherein each of the first and second strands have 5′ and 3′ ends, and wherein said RNA duplex is attached at the 5′ end of its second strand to the adjacent phosphate.
30. A composition comprising a compound of Formula (II) as defined in Sentence 27, and a compound of Formula (III) as defined in Sentence 28, optionally dependent on Sentence 29.
31. A composition according to Sentence 30, wherein said compound of Formula (III) as defined in Sentence 28 is present in an amount in the range of 10 to 15% by weight of said composition.
32. A compound of Formula (IV):

[chemical structure]

33. A compound of Formula (V):

[chemical structure]

34. A compound according to Sentence 32 or 33, wherein the oligonucleoside comprises an RNA duplex comprising first and second strands, wherein the first strand is at least partially complementary to an RNA sequence of a target gene, and the second strand is at least partially complementary to said first strand, and wherein each of the first and second strands have 5′ and 3′ ends, and wherein said RNA duplex is attached at the 3′ end of its second strand to the adjacent phosphate.
35. A composition comprising a compound of Formula (IV) as defined in Sentence 32, and a compound of Formula (V) as defined in Sentence 33, optionally dependent on Sentence 34.
36. A composition according to Sentence 35, wherein said compound of Formula (V) as defined in Sentence 33 is present in an amount in the range of 10 to 15% by weight of said composition.
37. A compound as defined in any of Sentences 1 to 29, or 32 to 34, wherein the oligonucleoside comprises an RNA duplex which further comprises one or more riboses modified at the 2′ position, preferably a plurality of riboses modified at the 2′ position.
38. A compound according to Sentence 37, wherein the modifications are chosen from 2′-O-methyl, 2′-deoxy-fluoro, and 2′-deoxy.
39. A compound according to any of Sentences 1 to 29, or 32 to 34, or 37 to 38, wherein the oligonucleoside further comprises one or more degradation protective moieties at one or more ends.
40. A compound according to Sentence 39, wherein said one or more degradation protective moieties are not present at the end of the oligonucleoside strand that carries the ligand moieties, and/or wherein said one or more degradation protective moieties is selected from phosphorothioate internucleoside linkages, phosphorodithioate internucleoside linkages and inverted abasic nucleosides, wherein said inverted abasic nucleosides are present at the distal end of the strand that carries the ligand moieties.
41. A compound according to any of Sentences 1 to 29, or 32 to 34, or 37 to 40, wherein said ligand moiety as depicted in Formula (I) in Sentence 1 comprises one or more ligands.
42. A compound according to Sentence 41, wherein said ligand moiety as depicted in Formula (I) in Sentence 1 comprises one or more carbohydrate ligands.
43. A compound according to Sentence 42, wherein said one or more carbohydrates can be a monosaccharide, disaccharide, trisaccharide, tetrasaccharide, oligosaccharide or polysaccharide.
44. A compound according to Sentence 43, wherein said one or more carbohydrates comprise one or more galactose moieties, one or more lactose moieties, one or more N-AcetylGalactosamine moieties, and/or one or more mannose moieties.
45. A compound according to Sentence 44, wherein said one or more carbohydrates comprise one or more N-Acetyl-Galactosamine moieties.
46. A compound according to Sentence 45, which comprises two or three N-AcetylGalactosamine moieties.
47. A compound according to any of Sentences 41 to 46, wherein said one or more ligands are attached in a linear configuration, or in a branched configuration.
48. A compound according to Sentence 47, wherein said one or more ligands are attached as a biantennary or triantennary branched configuration.
49. A compound according to Sentences 46 to 48, wherein said moiety:

[chemical structure]

[0677] as depicted in Formula (I) in Sentence 1 is any of Formulae (VIa), (VIb) or (VIc), preferably Formula (VIa):

[chemical structure]

[0678] wherein:
[0679] A_{I} is hydrogen, or a suitable hydroxy protecting group;
[0680] a is an integer of 2 or 3; and
[0681] b is an integer of 2 to 5; or

[chemical structure]

[0682] wherein:
[0683] A_{I} is hydrogen, or a suitable hydroxy protecting group;
[0684] a is an integer of 2 or 3; and
[0685] c and d are independently integers of 1 to 6; or

[chemical structure]

[0686] wherein:
[0687] A_{I} is hydrogen, or a suitable hydroxy protecting group;
[0688] a is an integer of 2 or 3; and
[0689] e is an integer of 2 to 10.
   50. A compound according to Sentences 46 to 48, wherein said moiety:

[chemical structure]

[0690] as depicted in Formula (I) in Sentence 1 is Formula (VII):

[chemical structure]

[0691] wherein:
[0692] A_{I} is hydrogen;
[0693] a is an integer of 2 or 3.
   51. A compound according to Sentence 49 or 50, wherein a=2.
   52. A compound according to Sentence 49 or 50, wherein a=3.
   53. A compound according to Sentence 49, wherein b=3.
   54. A compound of Formula (VIII):

[chemical structure]

55. A compound of Formula (IX):

[chemical structure]

56. A compound according to Sentence 54 or 55, wherein the oligonucleoside comprises an RNA duplex comprising first and second strands, wherein the first strand is at least partially complementary to an RNA sequence of a target gene, and the second strand is at least partially complementary to said first strand, and wherein each of the first and second strands have 5′ and 3′ ends, and wherein said RNA duplex is attached at the 5′ end of its second strand to the adjacent phosphate.
57. A composition comprising a compound of Formula (VIII) as defined in Sentence 54, and a compound of Formula (IX) as defined in Sentence 55, optionally dependent on Sentence 56.
58. A composition according to Sentence 57, wherein said compound of Formula (IX) as defined in Sentence 55 is present in an amount in the range of 10 to 15% by weight of said composition.
59. A compound of Formula (X):

[chemical structure]

60. A compound of Formula (XI):

[chemical structure]

61. A compound according to Sentence 59 or 60, wherein the oligonucleoside comprises an RNA duplex comprising first and second strands, wherein the first strand is at least partially complementary to an RNA sequence of a target gene, and the second strand is at least partially complementary to said first strand, and wherein each of the first and second strands have 5′ and 3′ ends, and wherein said RNA duplex is attached at the 3′ end of its second strand to the adjacent phosphate.
62. A composition comprising a compound of Formula (X) as defined in Sentence 59, and a compound of Formula (XI) as defined in Sentence 60, optionally dependent on Sentence 61.
63. A composition according to Sentence 62, wherein said compound of Formula (XI) as defined in Sentence 60 is present in an amount in the range of 10 to 15% by weight of said composition.
64. A compound as defined in any of Sentences 54 to 63, wherein the oligonucleoside comprises an RNA duplex which further comprises one or more riboses modified at the 2′ position, preferably a plurality of riboses modified at the 2′ position.
65. A compound according to Sentence 64, wherein the modifications are chosen from 2′-O-methyl, 2′-deoxy-fluoro, and 2′-deoxy.
66. A compound according to any of Sentences 54 to 65, wherein the oligonucleoside further comprises one or more degradation protective moieties at one or more ends.
67. A compound according to Sentence 66, wherein said one or more degradation protective moieties are not present at the end of the oligonucleoside strand that carries the ligand moieties, and/or wherein said one or more degradation protective moieties is selected from phosphorothioate internucleoside linkages, phosphorodithioate internucleoside linkages and inverted abasic nucleosides, wherein said inverted abasic nucleosides are present at the distal end of the strand that carries the ligand moieties, as shown in any of Formulae (VIII), (IX), (X) or (XI) in any of Sentences 54, 55, 59 or 60.
68. A process of preparing a compound according to any of Sentences 1 to 29, 32 to 34, 37 to 56, 59 to 61, and 64 to 67, and/or a composition according to any of Sentences 30, 31, 35, 36, 57, 58, 62, 63, which comprises reacting compounds of Formulae (XII) and (XIII):

[chemical structure]

[0694] herein:
[0695] R₁ at each occurrence is independently selected from the group consisting of hydrogen, methyl and ethyl;
[0696] R₂ is selected from the group consisting of hydrogen, hydroxy, —OC₁₋₃alkyl, —C(═O)OC₁₋₃alkyl, halo and nitro;
[0697] X₁ and X₂ at each occurrence are independently selected from the group consisting of methylene, oxygen and sulfur;
[0698] m is an integer of from 1 to 6;
[0699] n is an integer of from 1 to 10;
[0700] q, r, s, t, v are independently integers from 0 to 4, with the proviso that:
[0701] (i) q and r cannot both be 0 at the same time; and
[0702] (ii) s, t and v cannot all be 0 at the same time;
[0703] Z is an oligonucleoside moiety;
[0704] and where appropriate carrying out deprotection of the ligand and/or annealing of a second strand for the oligonucleoside moiety.
   69. A process according to Sentence 68, wherein a compound of Formula (XII) is prepared by reacting compounds of Formulae (XIV) and (XV):

[chemical structure]

[0705] R₁ at each occurrence is independently selected from the group consisting of hydrogen, methyl and ethyl;
[0706] R₂ is selected from the group consisting of hydrogen, hydroxy, —OC₁₋₃alkyl, —C(═O)OC₁₋₃alkyl, halo and nitro;
[0707] X₁ and X₂ at each occurrence are independently selected from the group consisting of methylene, oxygen and sulfur;
[0708] q, r, s, t, v are independently integers from 0 to 4, with the proviso that:
[0709] (i) q and r cannot both be 0 at the same time; and
[0710] (ii) s, t and v cannot all be 0 at the same time;
[0711] Z is an oligonucleoside moiety.
   70. A process according to Sentence 68, to prepare a compound according to any of Sentences 20, 25, 27, 29, 54, 56, and/or a composition according to any of Sentences 30, 31, 57, 58, wherein:
[0712] compound of Formula (XII) is Formula (XIIa):

[chemical structure]

[0713] and compound of Formula (XIII) is Formula (XIIIa):

[chemical structure]

[0714] wherein the oligonucleoside comprises an RNA duplex comprising first and second strands, wherein the first strand is at least partially complementary to an RNA sequence of a target gene, and the second strand is at least partially complementary to said first strand, and wherein each of the first and second strands have 5′ and 3′ ends, and wherein said RNA duplex is attached at the 5′ end of its second strand to the adjacent phosphate.
   71. A process according to Sentence 68, to prepare a compound according to any of Sentences 20, 25, 28, 29, 55, 56, and/or a composition according to any of Sentences 30, 31, 57, 58, wherein:
[0715] compound of Formula (XII) is Formula (XIIb):

[chemical structure]

[0716] and compound of Formula (XIII) is Formula (XIIIa):

[chemical structure]

[0717] wherein the oligonucleoside comprises an RNA duplex comprising first and second strands, wherein the first strand is at least partially complementary to an RNA sequence of a target gene, and the second strand is at least partially complementary to said first strand, and wherein each of the first and second strands have 5′ and 3′ ends, and wherein said RNA duplex is attached at the 5′ end of its second strand to the adjacent phosphate.
   72. A process according to Sentence 68, to prepare a compound according to any of Sentences 21, 26, 32, 34, 59, 61, and/or a composition according to any of Sentences 35, 36, 62, 63, wherein: compound of Formula (XII) is Formula (XIIc):

[chemical structure]

[0718] and compound of Formula (XIII) is Formula (XIIIa):

[chemical structure]

[0719] wherein the oligonucleoside comprises an RNA duplex comprising first and second strands, wherein the first strand is at least partially complementary to an RNA sequence of a target gene, and the second strand is at least partially complementary to said first strand, and wherein each of the first and second strands have 5′ and 3′ ends, and wherein said RNA duplex is attached at the 3′ end of its second strand to the adjacent phosphate.
   73. A process according to Sentence 68, to prepare a compound according to any of Sentences 21, 26, 33, 34, 60, 61, and/or a composition according to any of Sentences 35, 36, 62, 63, wherein:
[0720] compound of Formula (XII) is Formula (XIId):

[chemical structure]

[0721] and compound of Formula (XIII) is Formula (XIIIa):

[chemical structure]

[0722] wherein the oligonucleoside comprises an RNA duplex comprising first and second strands, wherein the first strand is at least partially complementary to an RNA sequence of a target gene, and the second strand is at least partially complementary to said first strand, and wherein each of the first and second strands have 5′ and 3′ ends, and wherein said RNA duplex is attached at the 3′ end of its second strand to the adjacent phosphate.
   74. A process according to any of Sentences 70 to 73, wherein:
[0723] compound of Formula (XIIIa) is Formula (XIIIb):

[chemical structure]

75. A process according to Sentences 69, as dependent on Sentences 70 to 73, wherein:
[0724] compound of Formula (XIV) is either Formula (XIVa) or Formula (XIVb):

[chemical structure]

[0725] and compound of Formula (XV) is either Formula (XVa) or Formula (XIVb):

[chemical structure]

[0726] wherein the oligonucleoside comprises an RNA duplex comprising first and second strands, wherein the first strand is at least partially complementary to an RNA sequence of a target gene, and the second strand is at least partially complementary to said first strand, and wherein each of the first and second strands have 5′ and 3′ ends, and wherein (i) said RNA duplex is attached at the 5′ end of its second strand to the adjacent phosphate in Formula (XVa), or (ii) said RNA duplex is attached at the 3′ end of its second strand to the adjacent phosphate in Formula (XVb).
   76. A compound of Formula (XII):

[chemical structure]

[0727] wherein:
[0728] R₁ at each occurrence is independently selected from the group consisting of hydrogen, methyl and ethyl;
[0729] R₂ is selected from the group consisting of hydrogen, hydroxy, —OC₁₋₃alkyl, —C(═O)OC₁₋₃alkyl, halo and nitro;
[0730] X₁ and X₂ at each occurrence are independently selected from the group consisting of methylene, oxygen and sulfur;
[0731] q, r, s, t, v are independently integers from 0 to 4, with the proviso that:
[0732] (i) q and r cannot both be 0 at the same time; and
[0733] (ii) s, t and v cannot all be 0 at the same time;
[0734] Z is an oligonucleoside moiety.
   77. A compound of Formula (XIIa):

[chemical structure]

78. A compound of Formula (XIIb):

[chemical structure]

79. A compound of Formula (XIIc):

[chemical structure]

80. A compound of Formula (XIId):

[chemical structure]

81. A compound of Formula (XIII):

[chemical structure]

[0735] wherein:
[0736] R₁ at each occurrence is independently selected from the group consisting of hydrogen, methyl and ethyl;
[0737] m is an integer of from 1 to 6;
[0738] n is an integer of from 1 to 10.
   82. A compound of Formula (XIIIa):

[chemical structure]

83. A compound of Formula (XIIIb):

[chemical structure]

84. A compound of Formula (XIV):

[chemical structure]

[0739] wherein:
[0740] R₁ is selected from the group consisting of hydrogen, methyl and ethyl;
[0741] R₂ is selected from the group consisting of hydrogen, hydroxy, —OC₁₋₃alkyl, —C(═O)OC₁₋₃alkyl, halo and nitro;
[0742] X₂ is selected from the group consisting of methylene, oxygen and sulfur,
[0743] s, t, v are independently integers from 0 to 4, with the proviso that s, t and v cannot all be 0 at the same time.
   85. A compound of Formula (XIVa):

[chemical structure]

86. A compound of Formula (XIVb):

[chemical structure]

87. A compound of Formula (XV):

[chemical structure]

[0744] wherein:
[0745] R₁ at each occurrence is independently selected from the group consisting of hydrogen, methyl and ethyl;
[0746] X₁ is selected from the group consisting of methylene, oxygen and sulfur;
[0747] q and r are independently integers from 0 to 4, with the proviso that q and r cannot both be 0 at the same time;
[0748] Z is an oligonucleoside moiety.
   88. A compound of Formula (XVa):

[chemical structure]

89. A compound of Formula (XVb):

[chemical structure]

90. Use of a compound according to any of Sentences 76, 81 to 84, 87, for the preparation of a compound according to any of Sentences 1 to 29, 32 to 34, 37 to 56, 59 to 61, and 64 to 67, and/or a composition according to any of Sentences 30, 31, 35, 36, 57, 58, 62 and 63.
91. Use of a compound according to Sentence 85, for the preparation of a compound according to any of Sentences 1 to 29, 32 to 34, 37 to 56, 59 to 61, and 64 to 67, and/or a composition according to any of Sentences 30, 31, 35, 36, 57, 58, 62 and 63, wherein R₂═F.
92. Use of a compound according to Sentence 86, for the preparation of a compound according to any of Sentences 1 to 29, 32 to 34, 37 to 56, 59 to 61, and 64 to 67, and/or a composition according to any of Sentences 30, 31, 35, 36, 57, 58, 62 and 63, wherein R₂═OH.
93. Use of a compound according to Sentence 77, for the preparation of a compound according to any of Sentences 20, 25, 27, 29, 54, 56, and/or a composition according to any of Sentences 30, 31, 57, 58.
94. Use of a compound according to Sentence 78, for the preparation of a compound according to any of Sentences 20, 25, 28, 29, 55, 56, and/or a composition according to any of Sentences 30, 31, 57, 58.
95. Use of a compound according to Sentence 79, for the preparation of a compound according to any of Sentences 21, 26, 32, 34, 59, 61, and/or a composition according to any of Sentences 35, 36, 62, 63.
96. Use of a compound according to Sentence 80, for the preparation of a compound according to any of Sentences 21, 26, 33, 34, 60, 61, and/or a composition according to any of Sentences 35, 36, 62, 63.
97. Use of a compound according to Sentence 88, for the preparation of a compound according to any of Sentences 20, 25, 27 to 29, 54 to 56, and/or a composition according to any of Sentences 30, 31, 57, 58.
98. Use of a compound according to Sentence 89, for the preparation of a compound according to any of Sentences 21, 26, 32 to 34, 59 to 61, and/or a composition according to any of Sentences 35, 36, 62, 63.
99. A compound or composition obtained, or obtainable by a process according to any of Sentences 68 to 75.
100. A pharmaceutical composition comprising of a compound according to any of Sentences 1 to 29, 32 to 34, 37 to 56, 59 to 61, and 64 to 67, and/or a composition according to any of Sentences 30, 31, 35, 36, 57, 58, 62 and 63, together with a pharmaceutically acceptable carrier, diluent or excipient.
101. A compound according to any of Sentences 1 to 29, 32 to 34, 37 to 56, 59 to 61, and 64 to 67, and/or a composition according to any of Sentences 30, 31, 35, 36, 57, 58, 62 and 63, for use in therapy.

[0749] In another aspect the present invention may be applied in the compounds, processes, compositions or uses of the following Clauses numbered 1-56 wherein reference to any Formula in the Clauses refers only to those Formulas that are defined within Clause 1-56. These formulae are reproduced in FIG. 6. Specifically, an oligonucleoside moiety as represented by Z in any of the following clauses can comprise a nucleic acid for inhibiting expression of ZPI as defined in any of the claims hereinafter.

1. A compound comprising the following structure:

[chemical structure]

[0750] wherein:
[0751] r and s are independently an integer selected from 1 to 16; and
[0752] Z is an oligonucleoside moiety.
   2. A compound according to Clause 1, wherein s is an integer selected from 4 to 12.
   3. A compound according to Clause 2, wherein s is 6.
   4. A compound according to any of Clauses 1 to 3, wherein r is an integer selected from 4 to 14.
   5. A compound according to Clause 4, wherein r is 6.
   6. A compound according to Clause 4, wherein r is 12.
   7. A compound according to Clause 5, which is dependent on Clause 3.
   8. A compound according to Clause 6, which is dependent on Clause 3.
   9. A compound according to any of Clauses 1 to 8, wherein Z is:

[chemical structure]

[0753] wherein:
[0754] Z₁, Z₂, Z₃, Z₄ are independently at each occurrence oxygen or sulfur; and
[0755] one the bonds between P and Z₂, and P and Z₃ is a single bond and the other bond is a double bond.
   10. A compound according to any of Clauses 1 to 9, wherein said oligonucleoside is an RNA compound capable of modulating, preferably inhibiting, expression of a target gene.
   11. A compound according to any of Clause 10, wherein said RNA compound comprises an RNA duplex comprising first and second strands, wherein the first strand is at least partially complementary to an RNA sequence of a target gene, and the second strand is at least partially complementary to said first strand, and wherein each of the first and second strands have 5′ and 3′ ends.
   12. A compound according to Clause 11, preferably also dependent on Clauses 3 and 6, wherein the RNA compound is attached at the 5′ end of its second strand to the adjacent phosphate.
   13. A compound according to Clause 11, preferably also dependent on Clauses 3 and 5, wherein the RNA compound is attached at the 3′ end of its second strand to the adjacent phosphate.
   14. A compound of Formula (II), preferably dependent on Clause 12:

[chemical structure]

15. A compound of Formula (III), preferably dependent on Clause 13:

[chemical structure]

16. A compound as defined in any of Clauses 1 to 15, wherein the oligonucleoside comprises an RNA duplex which further comprises one or more riboses modified at the 2′ position, preferably a plurality of riboses modified at the 2′ position.
17. A compound according to Clause 16, wherein the modifications are chosen from 2′-O-methyl, 2′-deoxy-fluoro, and 2′-deoxy.
18. A compound according to any of Clauses 1 to 17, wherein the oligonucleoside further comprises one or more degradation protective moieties at one or more ends.
19. A compound according to Clause 18, wherein said one or more degradation protective moieties are not present at the end of the oligonucleoside strand that carries the linker/ligand moieties, and/or wherein said one or more degradation protective moieties is selected from phosphorothioate internucleoside linkages, phosphorodithioate internucleoside linkages and inverted abasic nucleosides, wherein said inverted abasic nucleosides are present at the distal end of the same strand to the end that carries the linker/ligand moieties.
20. A compound according to any of Clauses 1 to 19, wherein said ligand moiety as depicted in Formula (I) in Clause 1 comprises one or more ligands.
21. A compound according to Clause 20, wherein said ligand moiety as depicted in Formula (I) in Clause 1 comprises one or more carbohydrate ligands.
22. A compound according to Clause 21, wherein said one or more carbohydrates can be a monosaccharide, disaccharide, trisaccharide, tetrasaccharide, oligosaccharide or polysaccharide.
23. A compound according to Clause 22, wherein said one or more carbohydrates comprise one or more galactose moieties, one or more lactose moieties, one or more N-AcetylGalactosamine moieties, and/or one or more mannose moieties.
24. A compound according to Clause 23, wherein said one or more carbohydrates comprise one or more N-Acetyl-Galactosamine moieties.
25. A compound according to Clause 24, which comprises two or three N-AcetylGalactosamine moieties.
26. A compound according to any of the preceding Clauses, wherein said one or more ligands are attached in a linear configuration, or in a branched configuration.
27. A compound according to Clause 26, wherein said one or more ligands are attached as a biantennary or triantennary branched configuration.
28. A compound according to Clauses 20 to 27, wherein said moiety:

[chemical structure]

[0756] as depicted in Formula (I) in Clause 1 is any of Formulae (IV), (V) or (VI), preferably Formula (IV):

[chemical structure]

[0757] wherein:
[0758] A_{I} is hydrogen, or a suitable hydroxy protecting group;
[0759] a is an integer of 2 or 3; and
[0760] b is an integer of 2 to 5; or

[chemical structure]

[0761] wherein:
[0762] A_{I} is hydrogen, or a suitable hydroxy protecting group;
[0763] a is an integer of 2 or 3; and
[0764] c and d are independently integers of 1 to 6; or

[chemical structure]

[0765] wherein:
[0766] A_{I} is hydrogen, or a suitable hydroxy protecting group;
[0767] a is an integer of 2 or 3; and
[0768] e is an integer of 2 to 10.
   29. A compound according to any of Clauses 1 to 28, wherein said moiety:

[chemical structure]

[0769] as depicted in Formula (I) in Clause 1 is Formula (VII):

[chemical structure]

[0770] wherein:
[0771] A_{I} is hydrogen;
[0772] a is an integer of 2 or 3.
   30. A compound according to Clause 28 or 29, wherein a=2.
   31. A compound according to Clause 28 or 29, wherein a=3.
   32. A compound according to Clause 28, wherein b=3.
   33. A compound of Formula (VIII):

[chemical structure]

34. A compound of Formula (IX):

[chemical structure]

35. A compound according to Clause 33 or 34, wherein the oligonucleoside comprises an RNA duplex which further comprises one or more riboses modified at the 2′ position, preferably a plurality of riboses modified at the 2′ position.
36. A compound according to Clause 35, wherein the modifications are chosen from 2′-O-methyl, 2′-deoxy-fluoro, and 2′-deoxy.
37. A compound according to any of Clauses 33 to 36, wherein the oligonucleoside further comprises one or more degradation protective moieties at one or more ends.
38. A compound according to Clause 37, wherein said one or more degradation protective moieties are not present at the end of the oligonucleoside strand that carries the linker/ligand moieties, and/or wherein said one or more degradation protective moieties is selected from phosphorothioate internucleoside linkages, phosphorodithioate internucleoside linkages and inverted abasic nucleosides, wherein said inverted abasic nucleosides are present at the distal end of the same strand to the end that carries the linker/ligand moieties.
39. A compound according to Clause 33, wherein the oligonucleoside comprises an RNA duplex comprising first and second strands, wherein the first strand is at least partially complementary to an RNA sequence of a target gene, and the second strand is at least partially complementary to said first strand, and wherein each of the first and second strands have 5′ and 3′ ends, and wherein said RNA duplex is attached at the 5′ end of its second strand to the adjacent phosphate.
40. A compound according to Clause 34, wherein the oligonucleoside comprises an RNA duplex comprising first and second strands, wherein the first strand is at least partially complementary to an RNA sequence of a target gene, and the second strand is at least partially complementary to said first strand, and wherein each of the first and second strands have 5′ and 3′ ends, and wherein said RNA duplex is attached at the 3′ end of its second strand to the adjacent phosphate.
41. A process of preparing a compound according to any of Clauses 1 to 40, which comprises reacting compounds of Formulae (X) and (XI):

[chemical structure]

[0773] wherein:
[0774] r and s are independently an integer selected from 1 to 16; and
[0775] Z is an oligonucleoside moiety;
[0776] and where appropriate carrying out deprotection of the ligand and/or annealing of a second strand for the oligonucleoside.
   42. A process according to Clause 41, to prepare a compound according to any of Clauses 6, 8 to 14, 16 to 33, and 35 to 40, wherein:
[0777] compound of Formula (X) is Formula (Xa):

[chemical structure]

[0778] and compound of Formula (XI) is Formula (Xia):

[chemical structure]

[0779] wherein the oligonucleoside comprises an RNA duplex comprising first and second strands, wherein the first strand is at least partially complementary to an RNA sequence of a target gene, and the second strand is at least partially complementary to said first strand, and wherein each of the first and second strands have 5′ and 3′ ends, and wherein said RNA duplex is attached at the 5′ end of its second strand to the adjacent phosphate.
   43. A process according to Clause 41, to prepare a compound according to any of Clauses 5, 7, 9 to 13, 15 to 32, and 34 to 40, wherein:
[0780] compound of Formula (X) is Formula (Xb):

[chemical structure]

[0781] and compound of Formula (XI) is Formula (Xia):

[chemical structure]

[0782] wherein the oligonucleoside comprises an RNA duplex comprising first and second strands, wherein the first strand is at least partially complementary to an RNA sequence of a target gene, and the second strand is at least partially complementary to said first strand, and wherein each of the first and second strands have 5′ and 3′ ends, and wherein said RNA duplex is attached at the 3′ end of its second strand to the adjacent phosphate.
   44. A process according to Clauses 42 or 43, wherein:
[0783] compound of Formula (Xia) is Formula (Xib):

[chemical structure]

45. A compound of Formula (X):

[chemical structure]

[0784] wherein:
[0785] r is independently an integer selected from 1 to 16; and
[0786] Z is an oligonucleoside moiety.
   46. A compound of Formula (Xa):

[chemical structure]

47. A compound of Formula (Xb):

[chemical structure]

48. A compound of Formula (XI):

[chemical structure]

[0787] wherein:
[0788] s is independently an integer selected from 1 to 16; and
[0789] Z is an oligonucleoside moiety.
   49. A compound of Formula (Xia):

[chemical structure]

50. A compound of Formula (Xib):

[chemical structure]

51. Use of a compound according to any of Clauses 45 and 48 to 50, for the preparation of a compound according to any of Clauses 1 to 40.
52. Use of a compound according to Clause 46, for the preparation of a compound according to any of Clauses 6, 8 to 14, 16 to 33, and 35 to 40.
53. Use of a compound according to Clause 47, for the preparation of a compound according to any of Clauses 5, 7, 9 to 13, 15 to 32, and 34 to 40.
54. A compound or composition obtained, or obtainable by a process according to any of Clauses 41 to 44.
55. A pharmaceutical composition comprising of a compound according to any of Clauses 1 to 40, together with a pharmaceutically acceptable carrier, diluent or excipient.
56. A compound according to any of Clauses 1 to 40, for use in therapy.

### EXAMPLES

[0790] The invention will be more fully understood by reference to the following examples. They should not, however, be construed as limiting the scope of the invention. It is understood that the examples and embodiments described herein are for illustrative purposes only and that various modifications or changes in light thereof will be suggested to persons skilled in the art and are to be included within the spirit and purview of this application and scope of the appended Clauses.

### Example 1: Synthesis of Tether 1

### General Experimental Conditions

[0791] Thin layer chromatography (TLC) was performed on silica-coated aluminium plates with fluorescence indicator 254 nm from Macherey-Nagel. Compounds were visualized under UV light (254 nm), or after spraying with the 5% H₂SO₄ in methanol (MeOH) or ninhydrin reagent according to Stahl (from Sigma-Aldrich), followed by heating. Flash chromatography was performed with a Biotage Isolera One flash chromatography instrument equipped with a dual variable UV wavelength detector (200-400 nm) using Biotage Sfär Silica 10, 25, 50 or 100 g columns (Uppsala, Sweden).

[0792] All moisture-sensitive reactions were carried out under anhydrous conditions using dry glassware, anhydrous solvents, and argon atmosphere. All commercially available reagents were purchased from Sigma-Aldrich and solvents from Carl Roth GmbH+Co. KG. D-Galactosamine pentaacetate was purchased from AK scientific.

[0793] HPLC/ESI-MS was performed on a Dionex UltiMate 3000 RS UHPLC system and Thermo Scientific MSQ Plus Mass spectrometer using an Acquity UPLC Protein BEH C4 column from Waters (300 Å, 1.7 μm, 2.1×100 mm) at 60° C. The solvent system consisted of solvent A with H₂O containing 0.1% formic acid and solvent B with acetonitrile (ACN) containing 0.1% formic acid. A gradient from 5-100% of B over 15 min with a flow rate of 0.4 mL/min was employed. Detector and conditions: Corona ultra-charged aerosol detection (from esa). Nebulizer Temp.: 25° C. N₂ pressure: 35.1 psi. Filter: Corona.

[0794] ¹H and ¹³C NMR spectra were recorded at room temperature on a Varian spectrometer at 500 MHz (¹H NMR) and 125 MHz (¹³C NMR). Chemical shifts are given in ppm referenced to the solvent residual peak (CDCl₃—¹H NMR: δ at 7.26 ppm and ¹³C NMR δ at 77.2 ppm: DMSO-d₆—1H NMR: δ at 2.50 ppm and ¹³C NMR δ at 39.5 ppm). Coupling constants are given in Hertz. Signal splitting patterns are described as singlet(s), doublet (d), triplet (t) or multiplet (m).

### Synthesis Route for the Conjugate Building Block TriGalNAc_Tether1:

[chemical structure]

[0796] Preparation of compound 2: D-Galactosamine pentaacetate (3.00 g, 7.71 mmol, 1.0 eq.) was dissolved in anhydrous dichloromethane (DCM) (30 mL) under argon and trimethylsilyl trifluoromethanesulfonate (TMSOTf, 4.28 g, 19.27 mmol, 2.5 eq.) was added. The reaction was stirred at room temperature for 3 h. The reaction mixture was diluted with DCM (50 mL) and washed with cold saturated aq. NaHCO₃ (100 mL) and water (100 mL). The organic layer was separated, dried over Na₂SO₄ and concentrated to afford the title compound as yellow oil, which was purified by flash chromatography (gradient elution: 0-10% MeOH in DCM in 10 CV). The product was obtained as colourless oil (2.5 g, 98%, rf=0.45 (2% MeOH in DCM)).

[chemical structure]

[0797] Preparation of compound 4: Compound 2 (2.30 g, 6.98 mmol, 1.0 eq.) and azido-PEG3-OH (1.83 g, 10.5 mmol, 1.5 eq.) were dissolved in anhydrous DCM (40 mL) under argon and molecular sieves 3 Å (5 g) were added to the solution. The mixture was stirred at room temperature for 1 h. TMSOTf (0.77 g, 3.49 mmol, 0.5 eq.) was then added to the mixture and the reaction was stirred overnight. The molecular sieves were filtered, the filtrate was diluted with DCM (100 mL) and washed with cold saturated aq. NaHCO₃ (100 mL) and water (100 mL). The organic layer was separated, dried over Na₂SO₄ and the solvent was removed under reduced pressure. The crude material was purified by flash chromatography (gradient elution: 0-3% MeOH in DCM in 10 CV) to afford the title product as light yellow oil (3.10 g, 88%, rf=0.25 (2% MeOH in DCM)). MS: calculated for C₂₀H₃₂N₄O₁₁, 504.21. Found 505.4. ¹H NMR (500 MHz, CDCl₃) δ 6.21-6.14 (m, 1H), 5.30 (dd, J=3.4, 1.1 Hz, 1H), 5.04 (dd, J=11.2, 3.4 Hz, 1H), 4.76 (d, J=8.6 Hz, 1H), 4.23-4.08 (m, 3H), 3.91-3.80 (m, 3H), 3.74-3.59 (m, 9H), 3.49-3.41 (m, 2H), 2.14 (s, 3H), 2.02 (s, 3H), 1.97 (d, J=4.2 Hz, 6H). ¹³C NMR (125 MHz, CDCl₃) δ 170.6©, 170.5 (C), 170.4 (C), 170.3 (C), 102.1 (CH), 71.6 (CH), 70.8 (CH), 70.6 (CH), 70.5 (CH), 70.3 (CH₂), 69.7 (CH₂), 68.5 (CH₂), 66.6 (CH₂), 61.5 (CH₂), 23.1 (CH₃), 20.7 (3×CH3).

[chemical structure]

[0798] Preparation of compound 5: Compound 4 (1.00 g, 1.98 mmol, 1.0 eq.) was dissolved in a mixture of ethyl acetate (EtOAc) and MeOH (30 mL 1:1 v/v) and Pd/C (100 mg) was added. The reaction mixture was degassed using vacuum/argon cycles (3×) and hydrogenated under balloon pressure overnight. The reaction mixture was filtered through celite and washed with EtOAc (30 mL). The solvent was removed under reduced pressure to afford the title compound as colourless oil (0.95 g, quantitative yield, rf=0.25 (10% MeOH in DCM)). The compound was used without further purification. MS: calculated for C₂₀H₃₄N₂O₁₁, 478.2. Found 479.4.

[chemical structure]

[0799] Preparation of compound 7: Tris {[2-(tert-butoxycarbonyl) ethoxy]methyl}-methylamine 6 (3.37 g, 6.67 mmol, 1.0 eq.) was dissolved in a mixture of DCM/water (40 mL 1:1 v/v) and Na₂CO₃ (0.18 g, 1.7 mmol, 0.25 eq.) was added while stirring vigorously. Benzyl chloroformate (2.94 mL, 20.7 mmol, 3.10 eq.) was added dropwise to the previous mixture and the reaction was stirred at room temperature for 24 h. The reaction mixture was diluted with CH₂Cl₂ (100 mL) and washed with water (100 mL). The organic layer was separated and dried over Na₂SO₄. The solvent was removed under reduced pressure and the resulting crude material was purified by flash chromatography (gradient elution: 0-10% EtOAc in cyclohexane in 12 CV) to afford the title compound as pale yellowish oil (3.9 g, 91%, rf=0.56 (10% EtOAc in cyclohexane)). MS: calculated for C₃₃H₅₃NO₁₁, 639.3. Found 640.9. ¹H NMR (500 MHz, DMSO-d₆) δ 7.38-7.26 (m, 5H), 4.97 (s, 2H), 3.54 (t, 6H), 3.50 (s, 6H), 2.38 (t, 6H), 1.39 (s, 27H). ¹³C NMR (125 MHz, DMSO-d₆) δ 170.3 (3×C), 154.5 (C), 137.1 (C), 128.2 (2×CH), 127.7 (CH), 127.6 (2×CH), 79.7 (3×C), 68.4 (3×CH2), 66.8 (3×CH2), 64.9 (C), 58.7 (CH₂), 35.8 (3×CH2), 27.7 (9×CH3).

[chemical structure]

[0800] Preparation of compound 8: Cbz-NH-tris-Boc-ester 7 (0.20 g, 0.39 mmol, 1.0 eq.) was dissolved in CH₂Cl₂ (1 mL) under argon, trifluoroacetic acid (TFA, 1 mL) was added and the reaction was stirred at room temperature for 1 h. The solvent was removed under reduced pressure, the residue was co-evaporated 3 times with toluene (5 mL) and dried under high vacuum to get the compound as its TFA salt (0.183 g, 98%). The compound was used without further purification. MS: calculated for C₂₁H₂₉NO₁₁, 471.6. Found 472.4.

[chemical structure]

[0801] Preparation of compound 9: CbzNH-tris-COOH 8 (0.72 g, 1.49 mmol, 1.0 eq.) and GalNAc-PEG3-NH₂ 5 (3.56 g, 7.44 mmol, 5.0 eq.) were dissolved in N,N-dimethylformamide (DMF) (25 mL). Then N,N,N′,N′-tetramethyl-O-(1H-benzotriazol-1-131ynthesium hexafluorophosphate (HBTU) (2.78 g, 7.44 mmol, 5.0 eq.), 1-hydroxy benzotriazole hydrate (HOBt) (1.05 g, 7.44 mmol, 5.0 eq.) and N,N-diisopropylethylamine (DIPEA) (2.07 mL, 11.9 mmol, 8.0 eq.) were added to the solution and the reaction was stirred for 72 h. The solvent was removed under reduced pressure, the residue was dissolved in DCM (100 mL) and washed with saturated aq. NaHCO₃ (100 mL). The organic layer was dried over Na₂SO₄, the solvent evaporated and the crude material was purified by flash chromatography (gradient elution: 0-5% MeOH in DCM in 14 CV). The product was obtained as pale yellowish oil (1.2 g, 43%, rf=0.20 (5% MeOH in DCM)). MS: calculated for C₈₁H₁₂₅N₇O₄₁, 1852.9. Found 1854.7. ¹H NMR (500 MHz, DMSO-d₆) δ 7.90-7.80 (m, 10H), 7.65-7.62 (m, 4H), 7.47-7.43 (m, 3H), 7.38-7.32 (m, 8H), 5.24-5.22 (m, 3H), 5.02-4.97 (m, 4H), 4.60-4.57 (m, 3H), 4.07-3.90 (m 10H), 3.67-3.36 (m, 70H), 3.23-3.07 (m, 25H), 2.18 (s, 10H), 2.00 (s, 13H), 1.89 (s, 11H), 1.80-1.78 (m, 17H). ¹³C NMR (125 MHz, DMSO-d₆) δ 170.1 (C), 169.8 (C), 169.7 (C), 169.4 (C), 169.2 (C), 169.1 (C), 142.7 (C), 126.3 (CH), 123.9 (CH), 118.7 (CH), 109.7 (CH), 100.8 (CH), 70.5 (CH), 69.8 (CH), 69.6 (CH), 69.5 (CH), 69.3 (CH₂), 69.0 (CH₂), 68.2 (CH₂), 67.2 (CH₂), 66.7 (CH₂), 61.4 (CH₂), 22.6 (CH₂), 22.4 (3×CH3), 20.7 (9×CH3).

[chemical structure]

[0802] Preparation of compound 10: Triantennary GalNAc compound 9 (0.27 g, 0.14 mmol, 1.0 eq.) was dissolved in MeOH (15 mL), 3 drops of acetic acid (AcOH) and Pd/C (30 mg) was added. The reaction mixture was degassed using vacuum/argon cycles (3×) and hydrogenated under balloon pressure overnight. The completion of the reaction was followed by mass spectrometry and the resulting mixture was filtered through a thin pad of celite. The solvent was evaporated and the residue obtained was dried under high vacuum and used for the next step without further purification. The product was obtained as pale yellowish oil (0.24 g, quantitative yield). MS: calculated for C₇₃H₁₁₉N₇O₃₉, 1718.8. Found 1719.3.

[chemical structure]

[0803] Preparation of compound 11: Commercially available suberic acid bis(N-hydroxysuccinimide ester) (3.67 g, 9.9 mmol, 1.0 eq.) was dissolved in DMF (5 mL) and triethylamine (1.2 mL) was added. To this solution was added dropwise a solution of 3-azido-1-propylamine (1.0 g, 9.9 mmol, 1.0 eq.) in DMF (5 mL). The reaction was stirred at room temperature for 3 h. The reaction mixture was diluted with EtOAc (100 mL) and washed with water (50 mL). The organic layer was separated, dried over Na₂SO₄ and the solvent was removed under reduced pressure. The crude material was purified by flash chromatography (gradient elution: 0-5% MeOH in DCM in 16 CV). The product was obtained as white solid (1.54 g, 43%, rf=0.71 (5% MeOH in DCM)). MS: calculated for C₁₅H₂₃N₅O₅, 353.4. Found 354.3.

[chemical structure]

[0804] Preparation of TriGalNAc (12): Triantennary GalNAc compound 10 (0.35 g, 0.24 mmol, 1.0 eq.) and compound 11 (0.11 g, 0.31 mmol, 1.5 eq.) were dissolved in DCM (5 mL) under argon and triethylamine (0.1 mL, 0.61 mmol, 3.0 eq.) was added. The reaction was stirred at room temperature overnight. The solvent was removed under reduced pressure, the residue was dissolved in EtOAc (100 mL) and washed with water (100 mL). The organic layer was separated and dried over Na₂SO₄. The solvent was evaporated and the resulting crude material was purified by flash chromatography (elution gradient: 0-10% MeOH in DCM in 20 CV) to afford the title compound as white fluffy solid (0.27 g, 67%, rf=0.5 (10% MeOH in DCM)). MS: calculated for C₈₄H₁₃₇N₁₁O₄₁, 1957.1. Found 1959.6.

Conjugation of Tether 1 to a siRNA Strand: Monofluoro Cyclooctyne (MFCO) Conjugation at 5′- or 3′-End

### 5′-End MFCO Conjugation

[chemical structure]

[symbol]

### 3′-End MFCO Conjugation

[chemical structure]

[symbol]

[0809] General conditions for MFCO conjugation: Amine-modified single strand was dissolved at 700 OD/mL in 50 mM carbonate/bicarbonate buffer pH 9.6/dimethyl sulfoxide (DMSO) 4:6 (v/v) and to this solution was added one molar equivalent of a 35 mM solution of MFCO-C6-NHS ester (Berry & Associates, Cat. #LK 4300) in DMF. The reaction was carried out at room temperature and after 1 h another molar equivalent of the MFCO solution was added. The reaction was allowed to proceed for an additional hour and was monitored by LC/MS. At least two molar equivalent excess of the MFCO NHS ester reagent relative to the amino modified oligonucleotide were needed to achieve quantitative consumption of the starting material. The reaction mixture was diluted 15-fold with water, filtered through a 1.2 μm filter from Sartorius and then purified by reserve phase (RP HPLC) on an Äkta Pure instrument (GE Healthcare).

[0810] Purification was performed using a XBridge C18 Prep 19×50 mm column from Waters. Buffer A was 100 mM TEAAc pH 7 and buffer B contained 95% acetonitrile in buffer A. A flow rate of 10 mL/min and a temperature of 60° C. were employed. UV traces at 280 nm were recorded. A gradient of 0-100% B within 60 column volumes was employed.

[0811] Fractions containing full length conjugated oligonucleotide were pooled, precipitated in the freezer with 3 M NaOAc, pH 5.2 and 85% ethanol and the collected pellet was dissolved in water. Samples were desalted by size exclusion chromatography and concentrated using a speed-vac concentrator to yield the conjugated oligonucleotide in an isolated yield of 40-80%.

### 5′-GalNAc-T1 Conjugates

[chemical structure]

### 3′-GalNAc-T1 Conjugates

[chemical structure]

[0814] General procedure for TriGalNAc conjugation: MFCO-modified single strand was dissolved at 2000 OD/mL in water and to this solution was added one equivalent solution of compound 12 (10 mM) in DMF. The reaction was carried out at room temperature and after 3 h 0.7 molar equivalent of the compound 12 solution was added. The reaction was allowed to proceed overnight and completion was monitored by LCMS. The conjugate was diluted 15-fold in water, filtered through a 1.2 μm filter from Sartorius and then purified by RP HPLC on an Äkta Pure instrument (GE Healthcare).

[0815] RP HPLC purification was performed using a XBridge C18 Prep 19×50 mm column from Waters. Buffer A was 100 mM triethylammonium acetate pH 7 and buffer B contained 95% acetonitrile in buffer A. A flow rate of 10 mL/min and a temperature of 60° C. were employed. UV traces at 280 nm were recorded. A gradient of 0-100% B within 60 column volumes was employed.

[0816] Fractions containing full-length conjugated oligonucleotide were pooled, precipitated in the freezer with 3 M NaOAc, pH 5.2 and 85% ethanol and the collected pellet was dissolved in water to give an oligonucleotide solution of about 1000 OD/mL. The O-acetates were removed by adding 20% aqueous ammonia. Quantitative removal of these protecting groups was verified by LC-MS.

[0817] The conjugates were desalted by size exclusion chromatography using Sephadex G25 Fine resin (GE Healthcare) on an Äkta Pure (GE Healthcare) instrument to yield the conjugated oligonucleotides in an isolated yield of 50-70%.

[0818] The following schemes further set out the routes of synthesis:

[chemical structure]

[chemical structure]

[chemical structure]

[chemical structure]

[chemical structure]

[chemical structure]

### Example 2: Duplex Annealing

[0819] To generate the desired siRNA duplex, the two complementary strands were annealed by combining equimolar aqueous solutions of both strands. The mixtures were placed into a water bath at 70° C. for 5 minutes and subsequently allowed to cool to ambient temperature within 2 h. The duplexes were lyophilized for 2 days and stored at −20° C.

[0820] The duplexes were analyzed by analytical SEC HPLC on Superdex™ 75 Increase 5/150 GL column 5×153-158 mm (Cytiva) on a Dionex Ultimate 3000 (Thermo Fisher Scientific) HPLC system. Mobile phase consisted of 1×PBS containing 10% acetonitrile. An isocratic gradient was run in 10 min at a flow rate of 1.5 mL/min at room temperature. UV traces at 260 and 280 nm were recorded. Water (LC-MS grade) was purchased from Sigma-Aldrich and Phosphate-buffered saline (PBS: 10×, pH 7.4) was purchased from GIBCO (Thermo Fisher Scientific).

### Example 3: Synthesis of Tether 2

### General Experimental Conditions

[0821] Thin layer chromatography (TLC) was performed on silica-coated aluminium plates with fluorescence indicator 254 nm from Macherey-Nagel. Compounds were visualized under UV light (254 nm), or after spraying with the 5% H₂SO₄ in methanol (MeOH) or ninhydrin reagent according to Stahl (from Sigma-Aldrich), followed by heating. Flash chromatography was performed with a Biotage Isolera One flash chromatography instrument equipped with a dual variable UV wavelength detector (200-400 nm) using Biotage Sfär Silica 10, 25, 50 or 100 g columns (Uppsala, Sweden).

[0822] All moisture-sensitive reactions were carried out under anhydrous conditions using dry glassware, anhydrous solvents, and argon atmosphere. All commercially available reagents were purchased from Sigma-Aldrich and solvents from Carl Roth GmbH+Co. KG. D-Galactosamine pentaacetate was purchased from AK scientific.

[0823] HPLC/ESI-MS was performed on a Dionex UltiMate 3000 RS UHPLC system and Thermo Scientific MSQ Plus Mass spectrometer using an Acquity UPLC Protein BEH C4 column from Waters (300 Å, 1.7 μm, 2.1×100 mm) at 60° C. The solvent system consisted of solvent A with H₂O containing 0.1% formic acid and solvent B with acetonitrile (ACN) containing 0.1% formic acid. A gradient from 5-100% of B over 15 min with a flow rate of 0.4 mL/min was employed. Detector and conditions: Corona ultra-charged aerosol detection (from esa). Nebulizer Temp.: 25° C. N₂ pressure: 35.1 psi. Filter: Corona.

[0824] ¹H and ¹³C NMR spectra were recorded at room temperature on a Varian spectrometer at 500 MHz (¹H NMR) and 125 MHz (¹³C NMR). Chemical shifts are given in ppm referenced to the solvent residual peak (CDCl₃—¹H NMR: δ at 7.26 ppm and ¹³C NMR δ at 77.2 ppm: DMSO-d₆—¹H NMR: δ at 2.50 ppm and ¹³C NMR δ at 39.5 ppm). Coupling constants are given in Hertz. Signal splitting patterns are described as singlet(s), doublet (d), triplet (t) or multiplet (m).

### Synthesis Route for the Conjugate Building Block TriGalNAc_Tether2:

[chemical structure]

[0826] Preparation of compound 2: D-Galactosamine pentaacetate (3.00 g, 7.71 mmol, 1.0 eq.) was dissolved in anhydrous dichloromethane (DCM) (30 mL) under argon and trimethylsilyl trifluoromethanesulfonate (TMSOTf, 4.28 g, 19.27 mmol, 2.5 eq.) was added. The reaction was stirred at room temperature for 3 h. The reaction mixture was diluted with DCM (50 mL) and washed with cold saturated aq. NaHCO₃ (100 mL) and water (100 mL). The organic layer was separated, dried over Na₂SO₄, and concentrated to afford the title compound as yellow oil, which was purified by flash chromatography (gradient elution: 0-10% MeOH in DCM in 10 CV). The product was obtained as colourless oil (2.5 g, 98%, rf=0.45 (2% MeOH in DCM)).

[chemical structure]

[0827] Preparation of compound 4: Compound 2 (2.30 g, 6.98 mmol, 1.0 eq.) and azido-PEG3-OH (1.83 g, 10.5 mmol, 1.5 eq.) were dissolved in anhydrous DCM (40 mL) under argon and molecular sieves 3 Å (5 g) were added to the solution. The mixture was stirred at room temperature for 1 h. TMSOTf (0.77 g, 3.49 mmol, 0.5 eq.) was then added to the mixture and the reaction was stirred overnight. The molecular sieves were filtered, the filtrate was diluted with DCM (100 mL) and washed with cold saturated aq. NaHCO₃ (100 mL) and water (100 mL). The organic layer was separated, dried over Na₂SO₄ and the solvent was removed under reduced pressure. The crude material was purified by flash chromatography (gradient elution: 0-3% MeOH in DCM in 10 CV) to afford the title product as light-yellow oil (3.10 g, 88%, rf=0.25 (2% MeOH in DCM)). MS: calculated for C₂₀H₃₂N₄O₁₁, 504.21. Found 505.4. ¹H NMR (500 MHz, CDCl₃) δ 6.21-6.14 (m, 1H), 5.30 (dd, J=3.4, 1.1 Hz, 1H), 5.04 (dd, J=11.2, 3.4 Hz, 1H), 4.76 (d, J=8.6 Hz, 1H), 4.23-4.08 (m, 3H), 3.91-3.80 (m, 3H), 3.74-3.59 (m, 9H), 3.49-3.41 (m, 2H), 2.14 (s, 3H), 2.02 (s, 3H), 1.97 (d, J=4.2 Hz, 6H). ¹³C NMR (125 MHz, CDCl₃) δ 170.6 (C), 170.5 (C), 170.4 (C), 170.3 (C), 102.1 (CH), 71.6 (CH), 70.8 (CH), 70.6 (CH), 70.5 (CH), 70.3 (CH₂), 69.7 (CH₂), 68.5 (CH₂), 66.6 (CH₂), 61.5 (CH₂), 23.1 (CH₃), 20.7 (3×CH3).

[chemical structure]

[0828] Preparation of compound 5: Compound 4 (1.00 g, 1.98 mmol, 1.0 eq.) was dissolved in a mixture of ethyl acetate (EtOAc) and MeOH (30 mL 1:1 v/v) and Pd/C (100 mg) was added. The reaction mixture was degassed using vacuum/argon cycles (3×) and hydrogenated under balloon pressure overnight. The reaction mixture was filtered through celite and washed with EtOAc (30 mL). The solvent was removed under reduced pressure to afford the title compound as colourless oil (0.95 g, quantitative yield, rf=0.25 (10% MeOH in DCM)). The compound was used without further purification. MS: calculated for C₂₀H₃₄N₂O₁₁, 478.2. Found 479.4.

[chemical structure]

[0829] Preparation of compound 7: Tris {[2-(tert-butoxycarbonyl) ethoxy]methyl}-methylamine 6 (3.37 g, 6.67 mmol, 1.0 eq.) was dissolved in a mixture of DCM/water (40 mL 1:1 v/v) and Na₂CO₃ (0.18 g, 1.7 mmol, 0.25 eq.) was added while stirring vigorously. Benzyl chloroformate (2.94 mL, 20.7 mmol, 3.10 eq.) was added dropwise to the previous mixture and the reaction was stirred at room temperature for 24 h. The reaction mixture was diluted with CH₂Cl₂ (100 mL) and washed with water (100 mL). The organic layer was separated and dried over Na₂SO₄. The solvent was removed under reduced pressure and the resulting crude material was purified by flash chromatography (gradient elution: 0-10% EtOAc in cyclohexane in 12 CV) to afford the title compound as pale yellowish oil (3.9 g, 91%, rf=0.56 (10% EtOAc in cyclohexane)). MS: calculated for C₃₃H₅₃NO₁₁, 639.3. Found 640.9. ¹H NMR (500 MHz, DMSO-d₆) δ 7.38-7.26 (m, 5H), 4.97 (s, 2H), 3.54 (t, 6H), 3.50 (s, 6H), 2.38 (t, 6H), 1.39 (s, 27H). ¹³C NMR (125 MHz, DMSO-d₆) δ 170.3 (3×C), 154.5 (C), 137.1 (C), 128.2 (2×CH), 127.7 (CH), 127.6 (2×CH), 79.7 (3×C), 68.4 (3×CH2), 66.8 (3×CH2), 64.9 (C), 58.7 (CH₂), 35.8 (3×CH2), 27.7 (9×CH3).

[chemical structure]

[0830] Preparation of compound 8: Cbz-NH-tris-Boc-ester 7 (0.20 g, 0.39 mmol, 1.0 eq.) was dissolved in CH₂Cl₂ (1 mL) under argon, trifluoroacetic acid (TFA, 1 mL) was added and the reaction was stirred at room temperature for 1 h. The solvent was removed under reduced pressure, the residue was co-evaporated 3 times with toluene (5 mL) and dried under high vacuum to get the compound as its TFA salt (0.183 g, 98%). The compound was used without further purification. MS: calculated for C₂₁H₂₉NO₁₁, 471.6. Found 472.4.

[chemical structure]

[0831] Preparation of compound 9: CbzNH-tris-COOH 8 (0.72 g, 1.49 mmol, 1.0 eq.) and GalNAc-PEG3-NH₂ 5 (3.56 g, 7.44 mmol, 5.0 eq.) were dissolved in N,N-dimethylformamide (DMF) (25 mL). Then N,N,N′,N′-tetramethyl-O-(1H-benzotriazol-1-146ynthesium hexafluorophosphate (HBTU) (2.78 g, 7.44 mmol, 5.0 eq.), 1-hydroxybenzotriazole hydrate (HOBt) (1.05 g, 7.44 mmol, 5.0 eq.) and N,N-diisopropylethylamine (DIPEA) (2.07 mL, 11.9 mmol, 8.0 eq.) were added to the solution and the reaction was stirred for 72 h. The solvent was removed under reduced pressure, the residue was dissolved in DCM (100 mL) and washed with saturated aq. NaHCO₃ (100 mL). The organic layer was dried over Na₂SO₄. the solvent evaporated and the crude material was purified by flash chromatography (gradient elution: 0-5% MeOH in DCM in 14 CV). The product was obtained as pale yellowish oil (1.2 g, 43%, rf=0.20 (5% MeOH in DCM)). MS: calculated for C₈₁H₁₂₅N₇O₄₁, 1852.9. Found 1854.7. ¹H NMR (500 MHz, DMSO-d₆) δ 7.90-7.80 (m, 10H), 7.65-7.62 (m, 4H), 7.47-7.43 (m, 3H), 7.38-7.32 (m, 8H), 5.24-5.22 (m, 3H), 5.02-4.97 (m, 4H), 4.60-4.57 (m, 3H), 4.07-3.90 (m 10H), 3.67-3.36 (m, 70H), 3.23-3.07 (m, 25H), 2.18 (s, 10H), 2.00 (s, 13H), 1.89 (s, 11H), 1.80-1.78 (m, 17H). ¹³C NMR (125 MHz, DMSO-d₆) δ 170.1 (C), 169.8 (C), 169.7 (C), 169.4 (C), 169.2 (C), 169.1 (C), 142.7 (C), 126.3 (CH), 123.9 (CH), 118.7 (CH), 109.7 (CH), 100.8 (CH), 70.5 (CH), 69.8 (CH), 69.6 (CH), 69.5 (CH), 69.3 (CH₂), 69.0 (CH₂), 68.2 (CH₂), 67.2 (CH₂), 66.7 (CH₂), 61.4 (CH₂), 22.6 (CH₂), 22.4 (3×CH3), 20.7 (9×CH3).

[chemical structure]

[symbol]

[0833] Preparation of compound 10: Triantennary GalNAc compound 9 (0.27 g, 0.14 mmol, 1.0 eq.) was dissolved in MeOH (15 mL), 3 drops of acetic acid (AcOH) and Pd/C (30 mg) was added. The reaction mixture was degassed using vacuum/argon cycles (3×) and hydrogenated under balloon pressure overnight. The completion of the reaction was followed by mass spectrometry and the resulting mixture was filtered through a thin pad of celite. The solvent was evaporated, and the residue obtained was dried under high vacuum and used for the next step without further purification. The product was obtained as pale yellowish oil (0.24 g, quantitative yield). MS: calculated for C₇₃H₁₁₉N₇O₃₉, 1718.8. Found 1719.3.

[chemical structure]

[symbol]

[0835] Preparation of compound 14: Triantennary GalNAc compound 10 (0.45 g, 0.26 mmol, 1.0 eq.), HBTU (0.19 g, 0.53 mmol, 2.0 eq.) and DIPEA (0.23 mL, 1.3 mmol, 5.0 eq.) were dissolved in DCM (10 mL) under argon. To this mixture, it was added dropwise a solution of compound 13 (0.14 g, 0.53 mmol, 2.0 eq.) in DCM (5 mL). The reaction was stirred at room temperature overnight. The solvent was removed, and the residue was dissolved in EtOAc (50 mL), washed with water (50 mL) and dried over Na₂SO₄. The solvent was evaporated, and the crude material was purified by flash chromatography (gradient elution: 0-5% MeOH in DCM in 20 CV). The product was obtained as white fluffy solid (0.25 g, 48%, rf=0.4 (10% MeOH in DCM)). MS: calculated for C₈₈H₁₃₇N₇O₄₂, 1965.1. Found 1965.6.

[chemical structure]

[symbol]

[0837] Preparation of TriGalNAc (15): Triantennary GalNAc compound 14 (0.31 g, 0.15 mmol, 1.0 eq.) was dissolved in EtOAc (15 mL) and Pd/C (40 mg) was added. The reaction mixture was degassed by using vacuum/argon cycles (3×) and hydrogenated under balloon pressure overnight. The completion of the reaction was monitored by mass spectrometry and the resulting mixture was filtered through a thin pad of celite. The solvent was removed under reduced pressure and the resulting residue was dried under high vacuum overnight. The residue was used for conjugations to oligonucleosides without further purification (0.28 g, quantitative yield). MS: calculated for C₈₁H₁₃₁N₇O₄₂, 1874.9. Found 1875.3.

Conjugation of Tether 2 to a siRNA Strand: TriGalNAc Tether 2 (GalNAc-T2) Conjugation at 5′-End or 3′-End

### 5′-GalNAc-T2 Conjugates

[chemical structure]

### 3′-GalNAc-T2 Conjugates

[chemical structure]

[0840] Preparation of TriGalNAc tether 2 NHS ester: To a solution of carboxylic acid tether 2 (compound 15, 227 mg, 121 μmol) in DMF (2.1 mL), N-hydroxysuccinimide (NHS) (15.3 mg, 133 μmol) and N,N′-diisopropylcarbodiimide (DIC) (19.7 μL, 127 μmol) were added. The solution was stirred at room temperature for 18 h and used without purification for the subsequent conjugation reactions.

[0841] General procedure for triGalNAc tether 2 conjugation: Amine-modified single strand was dissolved at 700 OD/mL in 50 mM carbonate/bicarbonate buffer pH 9.6/DMSO 4:6 (v/v) and to this solution was added one molar equivalent of Tether 2 NHS ester (57 mM) solution in DMF. The reaction was carried out at room temperature and after 1 h another molar equivalent of the NHS ester solution was added. The reaction was allowed to proceed for one more hour and reaction progress was monitored by LCMS. At least two molar equivalent excess of the NHS ester reagent relative to the amino modified oligonucleoside were needed to achieve quantitative consumption of the starting material. The reaction mixture was diluted 15-fold with water, filtered once through 1.2 μm filter from Sartorius and then purified by reserve phase (RP HPLC) on an Äkta Pure (GE Healthcare) instrument.

[0842] The purification was performed using a XBridge C18 Prep 19×50 mm column from Waters. Buffer A was 100 mM TEAA pH 7 and buffer B contained 95% acetonitrile in buffer A. A flow rate of 10 mL/min and a temperature of 60° C. were employed. UV traces at 280 nm were recorded. A gradient of 0-100% B within 60 column volumes was employed.

[0843] Fractions containing full-length conjugated oligonucleosides were pooled together, precipitated in the freezer with 3 M NaOAc, pH 5.2 and 85% ethanol and then dissolved at 1000 OD/mL in water. The O-acetates were removed with 20% ammonium hydroxide in water until completion (monitored by LC-MS).

[0844] The conjugates were desalted by size exclusion chromatography using Sephadex G25 Fine resin (GE Healthcare) on an Äkta Pure (GE Healthcare) instrument to yield the conjugated oligonucleotides in an isolated yield of 60-80%.

[0845] The conjugates were characterized by HPLC-MS analysis with a 2.1×50 mm XBridge C18 column (Waters) on a Dionex Ultimate 3000 (Thermo Fisher Scientific) HPLC system equipped with a Compact ESI-Qq-TOF mass spectrometer (Bruker Daltonics). Buffer A was 16.3 mM triethylamine, 100 mM HFIP in 1% MeOH in H2O and buffer B contained 95% MeOH in buffer A. A flow rate of 250 μL/min and a temperature of 60° C. were employed. UV traces at 260 and 280 nm were recorded. A gradient of 1-100% B within 31 min was employed.

[0846] The following schemes further set out the routes of synthesis:

[chemical structure]

[symbol]

[chemical structure]

[symbol]

[chemical structure]

[symbol]

[chemical structure]

[symbol]

### Example 4: Duplex Annealing

[0851] To generate the desired siRNA duplex, the two complementary strands were annealed by combining equimolar aqueous solutions of both strands. The mixtures were placed into a water bath at 70° C. for 5 minutes and subsequently allowed to cool to ambient temperature within 2 h. The duplexes were lyophilized for 2 days and stored at −20° C.

[0852] The duplexes were analyzed by analytical SEC HPLC on Superdex™ 75 Increase 5/150 GL column 5×153-158 mm (Cytiva) on a Dionex Ultimate 3000 (Thermo Fisher Scientific) HPLC system. Mobile phase consisted of 1×PBS containing 10% acetonitrile. An isocratic gradient was run in 10 min at a flow rate of 1.5 mL/min at room temperature. UV traces at 260 and 280 nm were recorded. Water (LC-MS grade) was purchased from Sigma-Aldrich and Phosphate-buffered saline (PBS; 10×, pH 7.4) was purchased from GIBCO (Thermo Fisher Scientific).

### Example 5: Alternative Synthesis Route for the Conjugate Building Block TriGalNAc_Tether2

[chemical structure]

[chemical structure]

[chemical structure]

[chemical structure]

Conjugation of Tether 2 to a siRNA Strand: TriGalNAc Tether 2 (GalNAc-T2) Conjugation at 5′-End or 3′-End

### Conjugation Conditions

[chemical structure]

[0855] Pre-activation: To a solution of compound 15 (16 umol, 4 eq.) in DMF (160 μL) was added TFA-O-PFP (15 μl, 21 eq.) followed by DIPEA (23 μl, 32 eq.) at 25° C. The tube was shaken for 2 h at 25° C. The reaction was quenched with H₂O (10 μL).

[0856] Coupling: The resulting mixture was diluted with DMF (400 μl), followed by addition of oligo-amine solution (4.0 μmol in 10×PBS, pH 7.4, 500 μL; final oligo concentration in organic and aqueous solution: 4 μmol/ml=4 mM). The tube was shaken at 25° C. for 16 h and the reaction was analysed by LCMS. The resulting mixture was treated with 28% NH₄OH (4.5 ml) and shaken for 2 h at 25° C. The mixture was analysed by LCMS, concentrated, and purified by IP-RP HPLC to produce the oligonucleotides conjugated to tether 2 GalNAc.

### 5′-GalNAc-T2 Conjugates

[chemical structure]

### 3′-GalNAc-T2 Conjugates

[chemical structure]

### Example 6: Solid Phase Synthesis Method: Scale ≤1 μmol

[0859] Syntheses of siRNA sense and antisense strands were performed on a MerMade192X synthesiser with commercially available solid supports made of controlled pore glass with universal linker (Universal CPG, with a loading of 40 μmol/g: LGC Biosearch or Glen Research).

[0860] RNA phosphoramidites were purchased from ChemGenes or Hongene.

[0861] The 2′-O-Methyl phosphoramidites used were the following: 5′-(4,4′-dimethoxytrityl)-N-benzoyl-adenosine 2′-O-methyl-3′-[(2-cyanoethyl)-(N,N-diisopropyl)]-phosphoramidite, 5′-(4,4′-dimethoxytrityl)-N-acetyl-cytidine 2′-O-methyl-3′-[(2-cyanoethyl)-(N,N-diisopropyl)]-phosphoramidite, 5′-(4,4′-dimethoxytrityl)-N-isobutyryl-guanosine 2′-O-methyl-3′-[(2-cyanoethyl)-(N,N-diisopropyl)]-phosphoramidite, 5′-(4,4′-dimethoxytrityl)-uridine 2′-O-methyl-3′-[(2-cyanoethyl)-(N,N-diisopropyl)]-phosphoramidite.

[0862] The 2′-F phosphoramidites used were the following: 5′-dimethoxytrityl-N-benzoyl-deoxyadenosine 2′-fluoro-3′-[(2-cyanoethyl)-(N,N-diisopropyl)]-phosphoramidite, 5′-dimethoxytrityl-N-acetyl-deoxycytidine 2′-fluoro-3′-[(2-cyanoethyl)-(N,N-diisopropyl)]-phosphoramidite, 5′-dimethoxytrityl-N-isobutyryl-deoxyguanosine 2′-fluoro-3′-[(2-cyanoethyl)-(N,N-diisopropyl)]-phosphoramidite and 5′-dimethoxytrityl-deoxyuridine 2′-fluoro-3′-[(2-cyanoethyl)-(N,N-diisopropyl)]-phosphoramidite.

[0863] All phosphoramidites were dissolved in anhydrous acetonitrile (Honeywell Research Chemicals) at a concentration of 0.05M, except 2′-O-methyl-uridine phosphoramidite which was dissolved in DMF/MeCN (1:4, v/v). Iodine at 0.02M in acetonitrile/Pyridine/H2O (DNAchem) was used as oxidizing reagent. Thiolation for phosphorothioate linkages was performed with 0.2 M PADS (TCI) in acetonitrile/pyridine 1:1 v/v. 5-Ethyl thiotetrazole (ETT), 0.25M mM in acetonitrile was used as activator solution.

[0864] Inverted abasic phosphoramidite, 3-O-Dimethoxytrityl-2-deoxyribose-5-[(2-cyanoethyl)-(N, N-diisopropyl)]-phosphoramidite were purchased from Chemgenes (ANP-1422) or Hongene (OP-040).

[0865] At each cycle, the DMT was removed by deblock solution, 3% TCA in DCM (DNAchem).

[0866] The coupling time was 180 seconds. The oxidizer contact time was set to 80 seconds and thiolation time was 2*100 seconds.

[0867] At the end of the synthesis, the oligonucleotides were cleaved from the solid support using a NH₄OH: EtOH solution 4:1 (v/v) for 20 hours at 45° C. (TCI). The solid support was then filtered off, the filter was thoroughly washed with H₂O and the volume of the combined solution was reduced by evaporation under reduced pressure.

[0868] Oligonucleotide were treated to form the sodium salt by ultracentrifugation using Amicon Ultra-2 Centrifugal Filter Unit: PBS buffer (10×, Teknova, pH 7.4, Sterile) or by EtOH precipitation from 1M sodium acetate.

[0869] The single strands identity were assessed by MS ESI- and then, were annealed in water to form the final duplex siRNA and duplex purity were assessed by size exclusion chromatography.

### Example 7: Solid Phase Synthesis Method: Scale ≥5 μmol

[0870] Syntheses of siRNA sense and antisense strands were performed on a MerMade12 synthesiser with commercially available solid supports made of controlled pore glass with universal linker (Universal CPG, with a loading of 40 μmol/g: LGC Biosearch or Glen Research) at 5 μmol scale. Sense strand destined t′ 3′ conjugation were synthesised at 12 μmol o′ 3′-PT-Amino-Modifier C6 CPG 500 Å solid support with a loading of 86 μmol/g (LGC).

[0871] RNA phosphoramidites were purchased from ChemGenes or Hongene.

[0872] The 2′-O-Methyl phosphoramidites used were the following: 5′-(4,4′-dimethoxytrityl)-N-benzoyl-adenosine 2′-O-methyl-3′-[(2-cyanoethyl)-(N,N-diisopropyl)]-phosphoramidite, 5′-(4,4′-dimethoxytrityl)-N-acetyl-cytidine 2′-O-methyl-3′-[(2-cyanoethyl)-(N,N-diisopropyl)]-phosphoramidite, 5′-(4,4′-dimethoxy trityl)-N-isobutyryl-guanosine 2′-O-methyl-3′-[(2-cyanoethyl)-(N,N-diisopropyl)]-phosphoramidite, 5′-(4,4′-dimethoxytrityl)-uridine 2′-O-methyl-3′-[(2-cyanoethyl)-(N,N-diisopropyl)]-phosphoramidite.

[0873] The 2′-F phosphoramidites used were the following: 5′-dimethoxytrityl-N-benzoyl-deoxyadenosine 2′-fluoro-3′-[(2-cyanoethyl)-(N,N-diisopropyl)]-phosphoramidite, 5′-dimethoxytrityl-N-acetyl-deoxycytidine 2′-fluoro-3′-[(2-cyanoethyl)-(N,N-diisopropyl)]-phosphoramidite, 5′-dimethoxytrityl-N-isobutyryl-deoxyguanosine 2′-fluoro-3′-[(2-cyanoethyl)-(N,N-diisopropyl)]-phosphoramidite and 5′-dimethoxytrityl-deoxyuridine 2′-fluoro-3′-[(2-cyanoethyl)-(N,N-diisopropyl)]-phosphoramidite.

[0874] Inverted abasic phosphoramidite, 3-O-Dimethoxytrityl-2-deoxyribose-5-[(2-cyanoethyl)-(N, N-diisopropyl)]-phosphoramidite were purchased from Chemgenes (ANP-1422) or Hongene (OP-040).

[0875] All phosphoramidites were dissolved in anhydrous acetonitrile (Honeywell Research Chemicals) at a concentration of 0.05M, except 2′-O-methyl-uridine phosphoramidite which was dissolved in DMF/MeCN (1:4, v/v). Iodine at 0.02M in acetonitrile/Pyridine/H₂O (DNAchem) was used as oxidizing reagent. Thiolation for phosphorothioate linkages was performed with 0.2 M PADS (TCI) in acetonitrile/pyridine 1:1 v/v. 5-Ethyl thiotetrazole (ETT), 0.25M mM in acetonitrile was used as activator solution.

[0876] At each cycle, the DMT was removed by deblock solution, 3% TCA in DCM (DNAchem).

[0877] For strands synthesised on universal CPG the coupling was performed with 8 eq. of amidite for 130 seconds. The oxidation time was 47 seconds, the thiolation time was 210 seconds.

[0878] For strands synthesised on 3′-PT-Amino-Modifier C6 CPG the coupling was performed with 8 eq. of amidite for 2*150 seconds. The oxidation time was 47 seconds, the thiolation time was 250 seconds

[0879] At the end of the synthesis, the oligonucleotides were cleaved from the solid support using a NH₄OH: EtOH solution 4:1 (v/v) for 20 hours at 45° C. (TCI). The solid support was then filtered off, the filter was thoroughly washed with H₂O and the volume of the combined solution was reduced by evaporation under reduced pressure.

[0880] Oligonucleotide were treated to form the sodium salt by EtOH precipitation from 1M sodium acetate.

[0881] The single strand oligonucleotides were purified by IP-RP HPLC on Xbridge BEH C18 5 μm, 130 Å, 19×150 mm (Waters) column with an increasing gradient of B in A. Mobile phase A: 240 mM HFIP, 7 mM TEA and 5% methanol in water; mobile phase B: 240 mM HFIP, 7 mM TEA in methanol.

[0882] The single strands purity and identity were assessed by UPLC/MS ESI-on Xbridge BEH C18 2.5 μm, 3×50 mm (Waters) column with an increasing gradient of B in A. Mobile phase A: 100 mM HFIP, 5 mM TEA in water; mobile phase B: 20% mobile phase A: 80% Acetonitrile (v/v).

[0883] Sense strand were conjugated as per protocols provided in any of examples 1, 3 or 5.

[0884] Sense and Antisense strands were then annealed in water to form the final duplex siRNA and duplex purity were assessed by size exclusion chromatography.

### Example 8: Nucleic Acid Sequences

[0885] siRNA oligonucleosides according to the present invention target ZPI. The full DNA sequence of the ZPI target is as follows (SEQ ID NO: 1):

AATGTGGGTTGGAGCCCCCATACAGAATCTCTATGGGGGCACTGCCTAGTGGAGCTGTGAGAAGACG
GCCACCGTCCTCCAGACCCCTGAATGGTAGATCCACCGACAGCTTGCGCCATTTATCCGGAAAAGCC
ACAGACACTCAACGCCAGCCCGTGAAAGCAGCCAGGAGGGAGGCTGTACCCTGCAAAGCCACAGGGG
CAGAGCTGCCCAAGACCAAGGGAAGCTACCTTTTGCATCAACGTGACCTGGACTCAAAGGAGATCAT
TTTGGAGCTTTAAAATTTGACTGACCTGCTGGATTTCAGACTTGCATGGGCCCTGTAACCACTTCGT
TTAGGCCAATTTCTCCCATTTGGAACAGCCGTATTTACCCAATACCTGTAACCCCATTGTATCTAGG
CAGTAACTAGCTTGCTTTTGATTTTACAGGCTCATAGGCAGAAGGGACTTGCCTTATCTCAGGTGAG
ACTTTGGATTGTGGACTTTTGGGTTAATGATGAAATGAGTTAAGACTTTGGGGGACTGTTGAGAAGG
CATGATTGGTTTTGAAATGTGAGGACATGAGATTTGGCAGGGCCAGAGGCGGAATGATATGGTTTGG
CTCTGTATCCCCACCCAAATCTCATCTTGAATTGTACTCCCATAATTCCCACATGTTGTGGGAAGGG
ACCCAGTGGGAGATAATTTGAATCATGGGGGTGGTTCCGCCATACTGTTCTTGTGATAGTGAATAAG
TCTCACAAGATCTGATGCCTTTATTGGGGGTTTCTGCTTTTGCGTCTTCCTCATTTTCTCTTGCCGC
CACCAGGTAAGCAGTGCCTTTTGCCTCCCACCATGATTCTGAGGCCTCCCCAGCCACGTGGAGCTGT
AAGTGCATTTAAACCTCTTTCTCTTCCCAGTCTCGGGTATGTCTTTATCAGCGGCGTGAAAATGGAC
TAATACACTGTGGTTATGTATTATAGTCATATGATATTTTCATATTTTTGGAAGCTGGGTGAAGGGT
AGATGTGGAGACCATGATTTTTGCAAATTTTTTTAAGTTTAAAGTTATTTCTAAATTAGAAGTTTAA
AAAGAAGAAATCACATAAGCCATAACACAATAGAAAGATGTCTTTAAAGTTCAAGGCAGGAGGGATG
TCTGGAAATCAGCGAGAAATTTGCACCTGTGTGTGCATGTGCATATGTGTGTGTGTATGTTGCAAGG
ACTTGGAAAGCCCTTTTTTTCCTACCTCTGTACTACTGTGGGGGGAGGCTAAACTTGACTTCTTCCC
ATCTTAGTTCTTTTTTGGGATAGACTCCTGTAACAAAAGACAGACAAGAGAAAAATCAGCTTACAAC
ATGGGCCATGCACTTCACACAGGAGAAACCTGCATGAAAAGTAACTCAAAATGGTGCCTTAGAACTC
CACTTACCTTTAGTAAAGAGCAATAAATTAGCAGGAAAATCATGGATCGGGACAAGGGAAGTGGTTT
TATGCTTCCAAGGGCAGGAAATCATGGAAGGTAAATATATGGGAGGAAACTAAAGGAATAAGGCTTG
TTTGCATATTCCTCTGATGCCATCTCTGGGTTGATAAGAGTCTAGAGTCATTTCCAGTAAAGATGAA
TTTTTATCTGTCTTTAGGAAGAAAGGGGGAAAGATAGAGAAAACTATTTCTCCATTTGCTGTTTCTT
AATTACCTTCAGTTCAAAAATAATTTTTATATCAGAAAGGCATATTTAGAGGTATGTTAGTTTATTT
TCACACTGCTAATAAAGACATACCCAAGACTGGGTAATTTATAAAGAAAAAGAGGTTTAATGGACTC
ACCGTTCCACATGGTTGGAGAGGCCTCACAATCAAGGCAGGTCTTACATGGCAGCAGGCAAGAGGGA
GAATGAGAGCCAAGCGAAAGGAATTTCCCCTTAAAAATCCCCTTATAAAACCATCAGATCTCGTGAG
ACTTACTCACTACCACAAGAACAGTATGGGGGAAACCACCTCTATGATTCAATGATCTCCCACTGGG
TACCCCCCAACAACACGTGGGAATTATGGGAGCTACAATTCAAGATAAGATTTGGGTGGGGACACAG
ACAGACCATATCAAGGGGTAACATAGTCTGGTTTCCTTTACTACCCACCTACCCAAACACCCCCTTC
ATCTGATCCACACAAAGTAAACTCTTGCAGTTCTCTCACTGTTTCCTGGAGTCTGCTTTTGGTCTCA
TAGGACTGCCCTAACGCTTGTTTTTCAGACGTTTAACCCTGTAGGTCTCTGGACAAATTTGCTTTAG
AAGCCCCTCGATGTCGCCCTGAAGAGTGGCTTTCAGAAGTTGTGCCTCCTGCCTGAGGGGAGTTCCA
GGAAGGGTTCTGCATCGCCTATGAGTTTATCTGGATCACCAGAGGCCTTCCCGTCAGAGCTTTCCCA
ATCGTTTTTGGCCAAGGAGTGTGAGAAGCTAAAGTTCATAACAACTGGAAGTCAGACAGCCTGGTCT
ATTCTGCTTTAACTCTAGCAGGAAAGGCCTTCATGGTGGGGCCTGAATATCTTCCTTTATAAAATCA
AAGCCTGGGGACAGGGTTACTTACTTCTGAGGTTCAATCTGGCTCTAAAATTATGCAACAAATGCCA
TTCCTTTAGCACTTCCTTCCTACCGGGCGAGATACTCAACTCCACAGGCACCACCTCAGTTCATCCT
CTCAGAAGTCCTAACAGCTCAGCCTGGGGCACCCCATTTTACAGATTAGTAAACTGAGGCTAAGAGA
GGTTAGGTAGCTTGTTCAGGGTCATGCTGCTGGTAAAAGAGCTCAGGCTACAGTGCTATGCATTGAG
TTTTCTCACTTTCCCATCTAACTGGAGGGCTAAAGGTCAAAGAGTGGGCAGCTCCCTTGTTGGGAGC
TGTACAGGAATAATGTCCTCCCTGAAGGAGGGGGACTTCTGAGCCACACCCTGGGGTCCAGGGCTCA
CAGCCTTAGGAGCAAAATCGTCCACCCCCTTCCTGGTTCCTCGGTGCTGCAGAGATATTCATAGGAC
AGAGTCTGAGTTCTGGCCACTTAACAGAGGAAGAAAGGCTGGCTCGGTGAGGTTAACTTACATCCCA
GCAGCTAGGAACCGGGAGCAGAGGACCTCAGATTCACACCAGGGCAGGAGGCAATGGCCTGGCTGAA
GCCTTCACAATCTTCCCAATATACTCCGCTGCCTTCCTTTATAAGGATCCATTTCTGAAACCCTGTG
CCCTGGCCAGGCACGGTGGCTCACACCTGTAATTCCAGTACTTTGGGAGGCCAAGGCAGGAGGACCA
CGAGGTCAGGAGTTTGAGACCAGCCTGGCCAATATGGTGAAACCCCGTCTCTACTAAAAATAGAAAA
ATTAGCGTGGTGGCAGGCGCCTGTAATCCCAGCTACTCGGGAGGCTGAGGCAGGAGAACTGTTTGAA
CCTGGGAGGTGGAGGTCTCAGTGAGCTGAGACAGACAGTGCCTGGGTGACAGACAGAGACTCCGTCT
CAAAAAAAAAAAAAAAAAGAAAGAAACCCTGTGCCCTAAGACCTGCACACTCGCTGGCTCCGCTCAG
ACATTTAGCAAAGCAGACACCTTCCCAGGCCTGGAGGAAACAGCCCCTGCTTTTTGGGAATCCACAA
GCCCGCAGCTGCAGAGCTCGACCTGGATGGGCAGGCAAAGGCTGACTCCTGTGCGTGGTGTGAGTCC
AGCCTGGCCCCTCTACACCCTCACTTTCACCTCTTAAAGAACTGCCTATTAACAGAGCAGGTACTGC
CCAAAAGGAACACTCTGGAAACTTGTTGGGACACTTCTGCCTTTCACAAACGTTTGGGGGGAGTACT
ACTAGCATTTAAGGATTGAGGGTTAGCAATGCCAGACATACCAGAACACGCAGGGCAGTCTCCCATG
ATGAAGAGGCCGCCGGGTTCCCCAGGACTCACATGTCCACCTCAAGTTCACGTGGGATTATCTGAGC
CTAGACTGTCAGTCCTGGGGCTGCTTTATTTCATATAAAAATATAATATTTATCCAAGGTTTTACTA
CACACTGCATTTTCTGTGAAGACAATGACCGTGTAAATCAGGGAAAGATCTATATTTTATTTTGTTT
GAAACTTTACCAAGCATTATTTACCATTTCAAAAGCTCTATCCCTGGTAGTACCATTGGTTTTCTTG
TTCACCGGCCAGCAGTGAGCAGCACACAAGCGACCTCCCGTGGGCTCCACATTGGACAGCCTCACTG
CACCTGCCCAGGCCCTTAGGCCACAGCACTGCCATATTCAGGGACACATTATTCTCTTTTATTATGC
CTCCATATTATCATTACAGCATTATCTTTTTTTTAATTTTGTGGGTAGATTATATTAGCTATACGTT
TCACTTCAATGGTAGTAGTAAGGGGCACATAACAAAATATTTACTTATATATATTAAAAAAGAGAGT
CTGAGAAGTCTGAAAAGTTTTGCCATAAACGGTCTCCACCAGCCTCAACTCTGAGTGCCCGAGGATT
CAGTCTCAAGTCCAGCAACATTGTGAAGCAGGAAATTTACCTTGAAAGGAGCTATGTACTCTAAGTA
GTGATTTACCTGTCTGCCTCCCCCACTGGATTGACCAGTTCCTTGGGGGCTGAGAGAACAGGTCCTG
AACATTTCTGCTGTGCCCCCCAACCCACATCCTCATAGTGTCCAGTACCAGGCTGGGGACTCAGGAA
GCATCCATGGGATCCCCCAGTGCCTTCTTTCTCGAGGTGTTCAGCACCTAGAACAGCTCAAGACAAA
TTCCCCACACCCCACCCAGACAGAGCTGAATCTTACTGGGGCGAAGCCTTGAGTTGCAAGGCAGAAG
CTCTCGTGATGGGATTTGGGTCATATTCCGGGTTATAGGAGGAGCTGGGGAGTATGGGAAGCCTCCC
ACTTGGTCTTTGGTTTTCCAGAAACTCCACCATCACAAGCAGGATGTTAATCAGTAACCGTCCCACA
GGGGATCATACTTTGGAATAGCAAATATTTGCTGAAGGTTCTGGGCTGCAAAGCTGAAGCTTTGGTT
TCTGCTCTAAATGAAGGACTTTTCCAGGACCCAAGGCCACACACTGGTAAGAGGCAGTGGGTTACAG
GAGACCTTCAATGAGTCTAATCAGGGAGGGACCGGGAAGGATGGTATCATCCCTGGGCGGGCTCCAA
CGTGAGGGCTGTGTGGCTGAGCAGTGCAAAGACCTCCATCCTACACTCCACAGGGACTGTACATACA
GATTGGGAGCTGGAGTGGGGTAAGAGGCGAATTATAGACACAAGGGGCTCCTCTGCAGGAAGGAGGC
CAAGGGAAAGAGGCTTGAAAGGCTTGATATTTCACCCACCACCACTCACTGCCGGAGTAAGCAGGTC
TCCCCTTCCCAGGGCTGAGGGGAGGCAGGGATGTGTGCTGTCCCAGGGCTGAGAAGTGGCAGGTGAG
CTGGTGATTCCTTACTGCCCAGGTTCTGTCTAGGAAGGTGCGTCCTCACCATGCTGGATGGTGTCCT
AGTCCAGGAGCACCCCCTGAGCTCCTGGCCTAGACTCCAAAGGGTTGGGTAGATGAGCAAAGACTTT
ACAAAGACCTTAGGCGATATATGTCCAGGAGCACCCAGGAATTACTGGGCTACCACTGCAGACTGCA
GGACAAGCTCCAAGAACAGGAAGGTAAGACTCAGCATTTGGAGGTGGTGACATCTAGTTGGCGTGCT
GGGCTAATTTCCTGACCATTGTACAGGGAGAAGTAACCTTGAATTCAGGAGTATTCTGTGTGGTCTT
AATGTAGAAAGTAGCACTAAATGATGCCACGTAATCGTTTTAGCTCAGGCTCCTCTAACAAAACACC
ACAGGCTGGGTGGCTCCAACAGCCATTGATTTTTCACAGTTTTGGAGGCTGAAAGTCCGAGTCAGGG
TGCCAGCGTGGCCGGATTCTGGTAGGGCTGTCTTCTTGGCTTGCAGATGGCCACCTTCGCACCGTGT
CCTCCCATGGAGAGGAGGTGCGGAGGGGGACTCTGCTCTCTTCTTATGACAGCACTAGTGCTATCAC
AGGGGCCTTGCCCTCACGACCTCATCTAAACCTAATCACCTCCCAAGCGCCCCAACTCTATTGCCAT
CACAATGGTGGTTCGGGCTTCAACTTATTAATTCTCAGGGGACACATTCAGTCCATAACAATAAAAG
CGTGAAACTGGGCTGCGTTTACACTGAAAGAGCTATTTACCCAACGTTTACAATACTTGGGTGACCT
GTTGAATGCAGGCTTGCCATTTAGAGTCAAAAAGAGCTTCCTCAACAGTGTCCTTTGGGAAACACAG
TGGAAGTATTTCACTGCTTCTACAGGGGAGAGGGTAGTGCCGTTCAGACTGCAGAGTGAGGCCCTGA
ATTCCGGGGTGCCATTCAGCCCGAGCAAGGGGCAACATGCTGGGCCCTGGCGCTGGAGGCGGTTTTG
TCCCAGGCATAGATAAGGACTCAGCCCCTGCATCAGGAAGAGGCCTGGCAGCACCGCCTGTCAATAC
ATTTTGCCGCAGGTGACCTTGGTCAAGAATAAGGGTCTCTGCTGATGGGAACTACTGTGAGGCCGGC
AGCATCCACCCTGCGCTCACTGGGCTGGGTGGCCTACCCCACCCAGACCCTCCCAGGGCAGTGGGCC
CAGAGAGAGGATGAGGGAGGGCAGGTGTCCCAGGGGTTCTGCCCAGCCAGCCTCTGGGATCAGGCCT
GCAGTGTGGCTGAACACCAGAACTGAGTTTGGACACAGCCAGGTGGCCCAGGCCAGTCCCAAGCCAT
GTATTTGGATGGAAAACATGGAAGTATTCAGGAGCCAGGCTCTGTGTCCAAGGATGTGGAGGGAGCC
TAAAAGGCGACAGAGAAGGGGACAGCTAACGGTGAAGAAGTGTAGCTCCCACACTGCAGCCTAGGAC
AGTGAGAACCGGCATGCAGCCCAGGTGGCTGAGGGCTCTATGAAGCCACAGTGGAGGGAGCCCAGAA
GTGGGTTGTATGAATTGCGGGGCCTCCTGCTACCCGGGAGCTGCAGCTATAGGAAGGAAGGAAGGAA
GGAAGACCTCCAAGGAACTGTGTAGCAGAGGTGCAGTGCAAAGAGAATTTTGATAAAAAATCCAGGA
AAGCTCCAATACTTTCCCCCTTCCTTGCCTAACGGGCATGCAGGCACTCCAATCCCCAGCCAAACAG
GGCACTGGGCAAGGCCGGCCACCCATCTGGATGGGCAGCCTGACGACCAGATGGTCAGGGCAGTGAA
TGAAGCAGATCAAGGAAAGGTGTGTGAGGACCCCTGATTCCACCTGCTTGGACCCCCACCTTCTGTG
CTGCCTCCTGCTCCCAGAGTGGACTCTCTTGCCCTGGCCCTCAGGGAGGAGACGGGATGAATGAAAA
CGGGGTCAGGACTGAGAGCTGCCTGCCGGCCTGGCAGGGAATGGGAACTGGAGGAGGTTTTGCTCTG
TGAAATAATGTCCCCTCTTTGGGTGAGCAAATGTCACCCACACTTGCTCTAGGTCTCCCTGGGGCAG
GGCTAACCTACTTGAGCCACAGGAAGGAGGCAGGGTCCCTGAAGAAGCTTTTACTATCCACAAAGAC
ATTTTAGGAGGCATTAAAACCATCTCTATCCTCTCCTCTCCACAGGAAGTCTTGCAGCTGAAGGGAG
GCACTCCTTGGCCTCCGCAGCCGATCACATGAAGGTGGTGCCAAGTCTCCTGCTCTCCGTCCTCCTG
GCACAGGTGTGGCTGGTACCCGGCTTGGCCCCCAGTCCTCAGTCGCCAGAGACCCCAGCCCCTCAGA
ACCAGACCAGCAGGGTAGTGCAGGCTCCCAAGGAGGAAGAGGAAGATGAGCAGGAGGCCAGCGAGGA
GAAGGCCAGTGAGGAAGAGAAAGCCTGGCTGATGGCCAGCAGGCAGCAGCTTGCCAAGGAGACTTCA
AACTTCGGATTCAGCCTGCTGCGAAAGATCTCCATGAGGCACGATGGCAACATGGTCTTCTCTCCAT
TTGGCATGTCCTTGGCCATGACAGGCTTGATGCTGGGGGCCACAGGGCCGACTGAAACCCAGATCAA
GAGAGGGCTCCACTTGCAGGCCCTGAAGCCCACCAAGCCCGGGCTCCTGCCTTCCCTCTTTAAGGGA
CTCAGAGAGACCCTCTCCCGCAACCTGGAACTGGGCCTCACACAGGGGAGTTTTGCCTTCATCCACA
AGGATTTTGATGTCAAAGAGACTTTCTTCAATTTATCCAAGAGGTATTTTGATACAGAGTGCGTGCC
TATGAATTTTCGCAATGCCTCACAGGCCAAAAGGCTCATGAATCATTACATTAACAAAGAGACTCGG
GGGAAAATTCCCAAACTGTTTGATGAGATTAATCCTGAAACCAAATTAATTCTTGTGGATTACATCT
TGTTCAAAGGTACTTTGATAATGTTCTGCTCTCCCAAGGCCACAGGGCCCTACGATTGTCTCTCCCT
TTCCTTTCGTTAGGCCAGCATATGATTAACGCTACGTGATTTTCTATGAATGTGTTTTCACGTTTCA
AAAACAGATTGATACACATATTGAACAGTGCCAGACGCTGTCATTTGAGGCCCTTCCCTGGTATCCT
ATGTGCTTGTAGTCCTTATTATTTTCAGAGCACTCTACATAGCTCCCCTCTGACACTTAGAAGCATA
GGGTCTTTCCAAAAAACAGGGGGCTGGGGGATTATCTGGGGGATTTAGGATTGCATCATTGCTCCTT
CATTTTTACTTTTTGACCAACTCTCTGCCCTTAGATTCCTATTATAGAAAATAGGGACACTCCACCT
ACTACAGTGTTAGAGGCTAAATGAGACAATGAATGTAAAGTGCCCAGATGGGCTTGGCACATAGCAG
ACACTGAGTATCTATTGTTTACTTGTTCTTCCAAACTGCCAATCAGCAGGTAGAGCAGGAGTTGTCT
CCTTTCTAAAGATGAAACCAGCTCAGAGACGTTAGCTTGATCAAGGTCACACAGTAAGTGGCAGAGG
CAAAACCCAAACAAGGGCCTCCTGACCCCCTGATCCTAGGTTCTGTCCAGCCCTGCCTCCCTAATGG
GGCACTGGACGTGGGTTGGATGCCACTTTCGCAGAGCTGGCACCAGACTTACAAAGCCCCGGCAGGG
GAAGCCACTTTACAACCAGCCAGGCCACACCCCCAGGGCAGACGTTTATGTAGAGAGTAATGTACCT
GCCTGCTAGTAGCCTCTGCATTGTGGGGCCTTCTCTCAGAACCACACTAAACAGTGGGTGGGTGAGA
AGTGTCACTCCTGCCACCTTGGACTCTGCATGTGCTTGTGCCTGGTGTGAATGAGACAAAGTGGCAG
TCAGAGGTGCCAGGCAAAGGCTTTTCTCTAAGCTGGAGCCAACTATGAGGGAACGACTGTGAATTCC
GTTCAGGTCCAGGACAATGAGAGGAGCCAGGGATTGTTAGGAAACATTTCCCTGCTTTCGTGTGCGA
TTCCCAATAGGGCCTGCGAGTGGAGCTGCATTTTGCTAGCTGGGCTAGAGGACGGGGAAAATTTTGG
GGAAATTTATTTTGCCTGCCTGAGCTGTGGAAAAGCCAACCCAATTAGGGAACGCCTTTCCTAGTTG
GAACGAGAAGACGAGAAGTGAGAGAAGTGAGATAGAAGGCTCCCTCTCTATTATTTGAGCAAGAACA
ATGCTTTTCAAAGAGGGAATTTCTGCAATGAGTTCTTCTCTTACTTGTTCAGGGAAATGGTTGACCC
CATTTGACCCTGTCTTCACCGAAGTCGACACTTTCCACCTGGACAAGTACAAGACCATTAAGGTGCC
CATGATGTACGGTGCAGGCAAGTTTGCCTCCACCTTTGACAAGAATTTTCGTTGTCATGTCCTCAAA
CTGCCCTACCAAGGAAATGCCACCATGCTGGTGGTCCTCATGGAGAAAATGGGTGACCACCTCGCCC
TTGAAGACTACCTGACCACAGACTTGGTGGAGACATGGCTCAGAAACATGAAAACCAGGTACAACTC
TTGCCCACACCCTATACAAACTCTACCTTTCTGTACTGGCAAACGCTCAGCACAATTTCATTGAATG
CACCGTGATTTAATGTCTCCTCCAGTGAGCTATAAGTTTCCTGAAGGCAGGGCAGCATTTGTCTTTT
TTTCCACTCTATCCCCAGCATCTGTCACAGGGTGCCTGGCTGATTCATTCATTGAGTCCATCAGTAT
TTTACGTTCTGCGACTGTGATAAATATATGATGCCAGGGATCCATCAGCAAACAAAACAGGCAAAAT
TAGTCTGCCCTCATGCAGCTTACATTCTATTGAAGGAAGACAAAGAGTAAATTAAAAATAGGTAATA
ATGCAGGGAAGGGGACAAGAAGCATCATCAGGATGCAGATGGAGGTTAGACAAGGCCTCTCCAAGAA
GGTAACAGTAAGCAAACATCTGAAGATGAAGGATAAACCATGTGGATATATTCGGGGAGAGAAGTGT
TATGTTACAGGCAGAAGTGTACAAGTTCTGGGATGGGAGTGTACCTGGTGGGTTTGAAGAACATCAA
GGAGACAAGTGTGGCTTCAGCAGTTGGAGATAAAATCAGAGAGGAAACAGGGGCCCAGTCCCCAGAA
AAGACTTGGGCTTTCCTGAGAGAGGCAGGAAGCCACTGGATGGTTCTGAGTAGAGGAGCAACCTGAT
TTTGACTTCTGTTTTTAAAGGATCACATAAGCTCCTGTGTTGAGAAAAGACACTAGGGGGTAAGGAT
GGAAGCAAGGGAGAGTGGTTAGAAAGTTACTAGCAATCCAGGTAGAGATGCTGCTACCTGGACTGCG
GTGGTGGTAGTGGAAGTGGTGAGAAGTGGCTGGATTCTGGATCTATTAGGAAGTGCAGGATCTGCTA
ATCGATTGGATGTGGGTGAGAGAGGTGTCAAAGGTGATCACAAAGTTTTTGGCCTTAGCAACTGGAA
AGACGGATTTGCCATTTACTGAAAGGGGGAGGAACAGGTCTGGGGTAAGTGCAGAAGTTCAGTCTTA
AACACTTGGATCAGAAATATCTATTAGACATCCAAGTTGAGATGTCAAGACGACAGGTGGATCTGGA
GTCTAGGGTGAGGTCCAGGCCGGAGATATAAATTCGGTCATCAACACAGAACTAGAATCTAGACACA
TGACAGGGTTGGGGTCTGTAAATATAGAGGAGAGGAAAAGAAAGCACAGAGTGGGCACTGAAATGTC
TGCCCAATAAATTAATCCACCTATTGGAGTACAAGGAAAATGGCTGCAATACGAATTCCATGGCTAT
GGCTTCTGAATCCTGTGACTCAGATTTTGGCAGACAAGTGCAGCTAAAGGTCCCCAGGGTTAGTTTT
ATCTTCATTATTCTTCTTTCATTTTTCTTCATATCTTTAGCACCTAACAATGAACCCCAAACATCAT
AAGCCCTCAAGTAATGTTTGCTGAATGAATAACTTTTTAAATTAATCTTCAAGACACGTCATGTCCT
CAATTATTTTTAAATAAATAAAAAAATTTTATTTTGAGCCACAGAACTCATCTTTTCAAGCAACATA
TTTTCAAAGGAGGACTCCAGTATACAAAATAGATGGTATCAGAGCTTCTCTGGCTAAAGACGGGTAG
GGGTTGAAAGTTTTCTTTGCTCCCCTCCCCATCCATCCCCAGACTCCTCGGGTCTGCAGAATCCAGG
AGCTGAAAACAGCCATCATCCAGGAGGCTGCAGGACTGCTGAAAGCAGCTGTTAACTCAGGTTTTTT
TTAAAATATAGGGAAATGAACACATAAGTACTTTGCTAAAGAAAACGTGAGTCACTGGCTGAGGAAT
AAAACTCATTCACTGAAGCTGAAGTACTATTTGATAAGCTAGAAATATTTTCCCTGAGTAGACCACT
GTAAAAGAATGGCATGAACTACATAGTCAACTGAAAGACTCATTAATGGAAATAATCTTAAAGAACA
AAAATTGTGACCTTTTTGGTGTCCACAGACTAGGGCTTTGTCTACATTTCACCATCATCTGTTCTTG
TACCACAGAAACATGGAAGTTTTCTTTCCGAAGTTCAAGCTAGATCAGAAGTATGAGATGCATGAGC
TGCTTAGGCAGATGGGAATCAGAAGAATCTTCTCACCCTTTGCTGACCTTAGTGAACTCTCAGCTAC
TGGAAGAAATCTCCAAGTATCCAGGGTAAGTCAGGATCTTTCATCAGAGCCCAACCTCAGCATGAAA
TGTCACCAAAACAAATGCTTTTACAAACCATTTAACTTTGATAAAATACCTAATTGTAGTGGAAAAT
TAGATTTAAGTCCCAAATACTTGAAATAGCACCCAGGTTGGATGTTTTAAGAATTTCAAGCAACTTC
ATTAAAATAACTTTTCAACTAATTTATTTTAAGCAGACCTCTCCCCCTCTGCTTAAAGTGCTCAGGG
AGAAATTTGACCCTGAAATAGAACTGGTTTACAGAGGCATCATCATTTATGTTGAATACAACTTGAA
TAGTTCATGAAATTACACCACCTTTACAATGAAACAAACCCCTAGACATCATCTAGCCCAACTTCTC
CCTCCTTGTGGAAATCCCCTCCATAGCCCTACGAAATAGCCCTCCAACTTCTCTTCCTCTTCATGCT
TCCAGTGACATCAAACTCACCATTTCTTTGAAGAGCTGCCCAATCCACAAATAGCTAAAATTGTTAT
ATGTATATATATATATGTGTGTATATATATGTATATATGTATGTGTGTATAAATGTATATGTGTGTA
TATGTGTGTGTGTATATATATATACACACACATATATATATATATGGAGAGAGACATACATATATAT
ATGGAGAGAGAGAGAGAGAGAGTCCTGTAACTTCTGATTCATACTTTTTGGTCCTAGTTCTATCTCT
AAAACTTCTAAGAACAAGTTTAGTCACCATCCACATAGAATCCCTTCAGTTACTCAGTGTTTCTCAG
TGGAAGGGTTCTTGGTTTTGAGGGGAACTGCTTGTTGTCCAGAGCAGTTGTGCATGTTGCAGGGAAC
TGGTTAGCATTGCTGGCCCATGTTCACTAATGCCAGTAGGAAACTCCAGTCATCACTATAAAAATGC
TCCCACACATTTCCAAATGGCAGCTACATCTCTCTACATTCTTCCTTAGCTGTGTGGTTTAATATTT
TCTTATACAATTGCAATTTTCAATTCCAAGAGAGACTAAAAATGGCATCCACTTAAGTAGGACACAG
TAGGGTAACTGTGGCCTGGAATCAGGTCTTACAACCTCAAGAGAGGTAAGACAATTAAATAAAACAA
TCCGTCAGACCAGCACCTGAAAGTGTTTCTGCTATGAACACATGAAAAACTGAAATGCGCTGCTGCT
TTATGAAGGGTCATCATGAAATTTAAACTGTAAATGATTAAATATTCTCCCTCTGTTTGCTCTGGGG
AATTAATTTTCCTCTAGGAAATCAGGGAATTTCCTGGAGTGAAAATCAGTGTAATTACATGTTATGT
TTTCATTATCTCTTATAACACAGTAATTATATAGGTACATCACTCATATCACATCTTGTTTCTGTAA
AAAAGGGCCTCCCAAACATAGCAAGCAGCCACAGTATAGGCAGCCAGAATTCAGGAAGGCTCCAGGG
ACCCCTGGGCTTGGCCCAGAAAAATGCCTCAGAGTAGTACCAGGTGCTGGGAAGCTGCTACAGAAGA
CTAGCCATTCCCTGCCTCCACCTTGCCTGCCAAAAGGAAAGTCAGAGGACTCAAGGGATCCAGGGAT
CAAGGGATCCAGGCAGCTTGAAAACCTTTTAGGAGCACCAGCTCAGCTCAAGAATTAGTAGCATAAA
TTACATGCTCAATAAAGATTTGATGCATGAGTGCATCCTGAGTCCATGCCCGGAATGTGTTTCACAT
ATTCCACAATACTTCACATTGGGTTCCTGAGGTCTCCTGGTATTGTTTAAGACTCCTGTGGCAGTCC
CTGGTGCAACCCCAGACCACTCCTCTTAACGTAGATGGGCCTGCTCCACTAAATCCCAGGAGCATGA
CCCCATGGGTAGGACCACTGTGAAGAATTTCAAGGGGCTCATTTAATTCCTCCTTTGCACTGCCACA
CAAATGGTTTTTCACATTATTTCCTTTTTCCAGGTTTTACAAAGAACAGTGATTGAAGTTGATGAAA
GGGGCACTGAGGCAGTGGCAGGAATCTTGTCAGAAATTACTGCTTATTCCATGCCTCCTGTCATCAA
AGTGGACCGGCCATTTCATTTCATGATCTATGAAGAAACCTCTGGAATGCTTCTGTTTCTGGGCAGG
GTGGTGAATCCGACTCTCCTATAATTCAGGACACGCATAAGCACTTCGTGCTGTAGTAGATGCTGAA
TCTGAGGTATCAAACACACACAGGATACCAGCAATGGATGGCAGGGGAGAGTGTTCCTTTTGTTCTT
AACTAGTTTAGGGTGTTCTCAAATAAATACAGTAGTCCCCACTTATCTGAGGGGGATACATTCAAAG
ACCCCCAGCAGATGCCTGAAACGGTGGACAGTGCTGAACCTTATATATATTTTTTCCTACACATACA
TACCTATGATAAAGTTTAATTTATAAATTAGGCACAGTAAGAGATTAACAATAATAACAACATTAAG
TAAAATGAGTTACTTGAATGCAAGCACTGCAATACCATAACAGTCAAACTGATTATAGAGAAGGCTA
CTAAGTGACTCATGGGCGAGGAGCATAGACAGTGTGGAGACATTGGGCAAGGGGAGAATTCACATCC
TGGGTGGGACAGAGCAGGACAATGCAAGATTCCATCCCACTACTCAGAATGGCATGCTGCTTAAGAC
TTTTAGATTGTTTATTTCTGGAATTTTTCATTTAATGTTTTTGGACCATGGTTGACCATGGTTAACT
GAGACTGCAGAAAGCAAAACCATGGATAAGGGAGGACTACTACAAAAGCATTAAATTGATACATATT
TTTTAAGATGTTTGTGCAATCTGTCTGGTATTTTAAGCTTGTTTCTAAGAACCTTAGTTACTTGGCT
AAAGACTAGCTGGGTAGAATATCTTTTCTCTGTTGCTCACATATTTTCATTTTTAAAAAGTTGCAGA
TGAGAACACTATGTCAAGATAAAGCCTTTGGGAGGAACACATGTAAACATTCTCCTTGAGTCATGTG
CTTCTCTCTCTTTCCTTCTCTCTGGTGCAAAATAAGTGTTTTATTTTAATCTATTACGGAGTCATTT
CTTGCTGACTGACATCAGAAGAAAATAGCTCTAACCAGTCCTGATCACAGCATCTGCTTCCATGGTG
CATCAAATCGCTTGGCAGAGGCATTGGCTGAATCACAGATCATCTAGTTCAATACCTTCATTTTACA
AAGGAAAGAAAGAGGGACCCAGAAACAGGTCCATATTCTTACTTTCATGGGCCCTAGGCACGTTTAA
CCTTGTAGACTCCTCCTTCCTTCATGAAGATATATATGTTCTATGGCTGCATTGGTAGAAAGATGAA
TATATTCGTCTTTCAAAGTTGCATATCTAGCTTCAAAGTTATATGTCTAGCATATGGCAATAAGCAA
AACACCTTCATGGGCCCTTACAGTACTGTCAGCCTTGGGCACTGTGTCTTCTGCATCTAGTGGATAA
GTCATACCTTATATACCAGTGGGAACAAAATACTTGTCCAAGGTCTTCCAGTGTGGCAATGGCAGAG
TCAGAAGCCTACCTTTCCTGAGTCTAGTCTCCAAGCCCTTTTTACTCTTCCTTCCATCTAAAACATC
TGATGGGGACCAGGTAAACAGCATGCACTACAGCTACCCATGGGGGTTAAACAGAATATAAGCATGA
ACTTTGTCCCAGGGTGAAAAGGAAAATCGTAAATATCCCTGATCTTCCTTAGGCAGTTATTTTCTGT
CACAGAAACAGAAAAGACTATATTCAGAGAATCCTGAATAGAGCTGATTTACAGTGTGAACTATGTT
AACTAAATGCCTAATTGGATTTCTGTCTGTCTGCTATCTAATGTTTAAAAAAACCTAAAATTCATTT
ATTGATTAGTTGTTTAATATAATTCAGAGTAATGTGAATAGGTAATAATATTAATATGCAGTCTAAA
TACTGACTTTTCATCATTCCATAACCTGGACTGATGAAAAGTCAGTATTTAGACTGCATATTAATAA
AATAAAATTCATTCCTGTATTCATTCCAAGAGTACTAATTGACACTTATGAAGGGACAGGCAATTCT
AGGCCCTAGAGGGCCAAAGACAGAGGACTAACTCTATCTGACATTCTTAAGTCACCTTGTTTGTGTT
CAATTAGTCAGATTTGTTTGTGGAAAAATAGTAGAAAGAGGAATAAAGTAGCATCCAGTCCAATTTC
CCACTTTTAAGAGATGAAATCTGGAAAAATAAGTCTGTGAGAGCACAATACTCACTGAAATCAATAT
GGCCAAACCCAGTAATAAAAAGGTACATTATTATTGAAGGATTCATATAGCATGCAGATAAAAAACT
CCTGCCTTCTTCCCACCACATACACTGCAAAGCAACAACAGCATAATAATTGTATTTAATATACTAC
TCTTTAAGGTAGAAAATGGACCTATTCTATATTTTAAATATACTTTTTAATGTTCCCTCACATTTGC
TTTAAGAAGTTCCTAAGACACTCAGTTTCAGATTTCCCAAGTACACAGGCATGACAGAAAAACGCAG
ACCAATAAAAAATGTAACTTACCTTACACAAATACATACACACAAATTCAGGGTTTCCAACCGAGCG
GGGGAAATCTTAACATTGTAGAAGTCTTCACTATATATGTGTCGAGTTTTTGTTTTTGTTTTTGTTT
TTGTTTTGAGACAGAGTCTTGCTCTGTCACCCAGGCTGGAGTGCAGTGGTGCGATCTCAGCTCACTG
CAACCTCCACCTCCCGGGTTCGTGCCATTCTCCTGCCTCAGCCTCCCGAGTAGCTGGGACTACAGGC
ACCTGCCACCACGACCGGCTAATTTTTTGTATTTTAAGTAGAGATGGGGTTTCACTGTGTTAGTCAG
GATGGTCTTGATCTCCTGACCTTGTGATCTGCCCGCCTCGGCCTCCCAAAGTGCTGGGATTACAGGC
ATGAGCCACCACGCCCGGCCAAGTGTCGAGTCTTAAAAATTGTTCCTACACAGACACACTCAACCAC
ACGTTCTCACATATATATGCTGTAACAACTGAGAACAGGTTACTGACTTAATCTAATTCATTCTATC
TTCATTGTAAAACTTCCACTCCAGCTGAAGAGCCTGTTTCATTTCAATTCAAAGATTTCTCATATAT
CCACTAATTGTATGGCAAAACTGACTCATCTCCAGACTAAGATATTCAAGCTCAGGAAGTCAAATAA
TAGAAATGATTTTTTAAATGTGTAAGAGGTTATAAAGAAAAACTTTATGTGCTCCTTATTTAACCTC
TATTAAGTAAAATCCTTTATAGACCTATCTCCATTTCTGCAGTAAAAGTGAGCTCTACAGTTAGCTT
GTAAGGCTAACTAGTGAAATTCCTGGACTTGTTCTTAAAAATGCAAGTTTTAGTAATTAACAAAATG
ATGATGAAGATGTCCCTTTTCCCTACAACTACAGATGGAGGGAGATTTTTCTTTGCCATACAACTAG
CTTAAAGGATTAATTTGATAAGTTGTTAAACTGAGAACTTTCACAAAAGTATCCATCTTGTTTTTGA
TATAAATGGAGATACATGTAGTTATTCATAACTGTCAGTAATTTGCTGTTTATCCTGTTTCTATATA
TCTGTCCTTGAGAGTATAATTTTAATAAATATTTCAAAGATTTTAGGAAATGTCATGTTCTGTTAAA
AAACTTCCAAAAGTAATTTTGATGAACAGTTTTGATAACTTAGTACTAACTAGGACTAAGACTGCAA
TTGACTGCTCTACATTCCTGAACTTTATAAGCAGTAGTTGTTTCTCTCTGTCAAATCAGTGTCCCCT
TTTCCCATTTGCATCATGGGAAAGTGAAACCTTATAATTCTGCTAAATTTATTATAACAAATACATT
GAAATTCTCCATTTTATTAAATTAATAGAATGTTATGAATCAAAGCACCAAAAAAACTGATGCAATT
TTGATGTCTCGTTCTGTACCACATTCTCCAGATCTTAATATATTCAGTTCCACATTATTGGTGCTAG
TAGGAGACATAATGAAAACAGTTAAATGAAATCCACAGCGAGTATACTGATTAACCAGTACTGTCAA
ATTTCTCATACCTATTGAATTTTAACTACTGACAAAATGAGCAGTAACAATTCCATTTACCTGATTG
TCCTTTGGCAAAGGATATTATTAAGAATCACTAAAAATAGCCATAAAGAAGCCATATGGAAGGAAGA
AGGAAAACAAATGGCATGAAAAGGTCTCTCACTGAGTAACTATGCTCTTATAGTTGACGCTGGTATA
TTTCTTTTATTCACTACCTAAAAATGAACTATCTTACTCTTTAATTATAGAATAAAAACTGCAGGAA
AGTATTTAAGACTTTTTTTCACAAACACAGGTATCTCATTAACCTATGTTTTATTTTGAGTAAATTC
ATTATTCATTATTTCACATTATAAAAAGTAACCACACATACATATGCATTCACAAATTAGATCATCT
TTATCATACATCAATATATTTTAAAAAACAAATATCTTCTAATATCAATATAGTTATATGCTGATTG
CATTTTGAAATAGAGAAGCTGACAATAGCTTCACACGGTATATCTCAAGAACTGACAGTTTAAAATT
AAGAACTGTATATATTCCACAGGCAAATTTTGATGGAAATATTAGCATTAGTACAAATAAATGCTGT
TGACATAGCTTAAGCATGATAGCTTGGAATAACAGCTGATTCAGACTAGATTCATCATTTTAAATAA
AGACAAGTACAATCTAAAATGTAAACAAAGTATTTATAAAATAAATTCTCTAGGAAATAAAGAAAAT
CATCAATCTATTATTTTTAAGGTATTTATAGCTCAAAGTTACCAGAAATCTTTGTGGAATTTTCACT
GCCAAATTTAAATTTGGGAATGTCCGGGTACAACATATTGTCACCACAATCCGGAGGGCCGCCAAAA
TCGCAGACGGCTATTTGCATCCTTTCAGTGTGACTTTTCAAGTGGGCTTGGAGACTCATGAGAAAAT
GCAGTATCTTTCTCACCTTCCAAGTCCCCCTCCAAGTGCTTATCAAGCTAGGACAATTCAGCTGATG
TAGACTTTCATACGATTTTTAAATGCTAAAACTCTAGAACAATTAAATGGCTGGTTTCCTGCACAAA
TAAATGCAGACTTGTCTCTTTTGCAGCAGTGGTTAAAGCACATTCCTAGAGATGTTTTTCATTACAC
TTCACTATAACATTGGAATTCCGTAACCACATTATTACTCAAGAAATATATATTATACCTCCTAGGG
AATCTAATTTGAAATATGAAAAGTTTAACATCAGCTGTCATTATGTCTCTCTTTCTGCTCATTAACA
ACAACAAAAAAAAAAACCCAAAATTTAAAAACAAAGCCCCAGCCACTGCTTTAGCTTTTGTGTACCA
ATCACATTATCTCCTGCTGCCTTTGTTTTGCCTCCTTCATCAAGCAGTTGATTTAAGGATTGGATTT
TCTGGATTTTCTTTGGGAAGAAAGAAATGAAGGAAGAGAGGGAGGGTGGGGAAGGAGGGAGTGAGAA
AGGGAGAAAAAGAAAAAAATATGAAAAATGTTATTCATATAATGTGTACAAAGTAAATTAAAAATAT
ATAGATACTCTACTTTGAATAATTCTAATATATGAGAAGT

[0886] Following Table 1 provides oligonucleoside mRNA target sequences of ZPI. together with the corresponding positions in transcript NM_016186.3. It is to be understood that SEQ ID NOs: 2 to 121 refer to human (Homo sapiens) mRNA sequences.

TABLE 1

| | Oligonucleoside mRNA | Starting |
|---|---|---|
| | target sequence | position on |
| SEQ ID NO | 5′ → 3′ | NM_016186.3 |
| SEQ ID NO: 2 | UUUGCCUUCAUCCACAAGGAUUU | 991 |
| SEQ ID NO: 3 | GCUGCGAAAGAUCUCCAUGAGGC | 756 |
| SEQ ID NO: 4 | AUGCUGGUGGUCCUCAUGGAGAA | 1390 |
| SEQ ID NO: 5 | CUGCGAAAGAUCUCCAUGAGGCA | 757 |
| SEQ ID NO: 6 | AAGUAUGAGAUGCAUGAGCUGCU | 1531 |
| SEQ ID NO: 7 | CUGUUUGAUGAGAUUAAUCCUGA | 1156 |
| SEQ ID NO: 8 | GAUGAGAUUAAUCCUGAAACCAA | 1162 |
| SEQ ID NO: 9 | UUUGAUGAGAUUAAUCCUGAAAC | 1159 |
| SEQ ID NO: 10 | UGAUGAGAUUAAUCCUGAAACCA | 1161 |
| SEQ ID NO: 11 | UUGAUGAGAUUAAUCCUGAAACC | 1160 |
| SEQ ID NO: 12 | AACUGUUUGAUGAGAUUAAUCCU | 1154 |
| SEQ ID NO: 13 | AGUUUUGCCUUCAUCCACAAGGA | 988 |
| SEQ ID NO: 14 | UGCGAAAGAUCUCCAUGAGGCAC | 758 |
| SEQ ID NO: 15 | CAUGCUGGUGGUCCUCAUGGAGA | 1389 |
| SEQ ID NO: 16 | UGCCUUCAUCCACAAGGAUUUUG | 993 |
| SEQ ID NO: 17 | GCGAAAGAUCUCCAUGAGGCACG | 759 |
| SEQ ID NO: 18 | CCUUCAUCCACAAGGAUUUUGAU | 995 |
| SEQ ID NO: 19 | UGUUUGAUGAGAUUAAUCCUGAA | 1157 |
| SEQ ID NO: 20 | UUUUGCCUUCAUCCACAAGGAUU | 990 |
| SEQ ID NO: 21 | AAGAUCUCCAUGAGGCACGAUGG | 763 |
| SEQ ID NO: 22 | ACCAUGCUGGUGGUCCUCAUGGA | 1387 |
| SEQ ID NO: 23 | GUUUUGCCUUCAUCCACAAGGAU | 989 |
| SEQ ID NO: 24 | UUGCCUUCAUCCACAAGGAUUUU | 992 |
| SEQ ID NO: 25 | CCUACCAAGGAAAUGCCACCAUG | 1370 |
| SEQ ID NO: 26 | GUUUGAUGAGAUUAAUCCUGAAA | 1158 |
| SEQ ID NO: 27 | GCCUUCAUCCACAAGGAUUUUGA | 994 |
| SEQ ID NO: 28 | CGAAAGAUCUCCAUGAGGCACGA | 760 |
| SEQ ID NO: 29 | ACUGUUUGAUGAGAUUAAUCCUG | 1155 |
| SEQ ID NO: 30 | CCAUGCUGGUGGUCCUCAUGGAG | 1388 |
| SEQ ID NO: 31 | GAGUUUUGCCUUCAUCCACAAGG | 987 |
| SEQ ID NO: 32 | UGCCACCAUGCUGGUGGUCCUCA | 1383 |
| SEQ ID NO: 33 | GCCACCAUGCUGGUGGUCCUCAU | 1384 |
| SEQ ID NO: 34 | GAAAGAUCUCCAUGAGGCACGAU | 761 |
| SEQ ID NO: 35 | GGAGUUUUGCCUUCAUCCACAAG | 986 |
| SEQ ID NO: 36 | CCACCAUGCUGGUGGUCCUCAUG | 1385 |
| SEQ ID NO: 37 | AAAGAUCUCCAUGAGGCACGAUG | 762 |
| SEQ ID NO: 38 | CACCAUGCUGGUGGUCCUCAUGG | 1386 |
| SEQ ID NO: 39 | UUUGCCUCCACCUUUGACAAGAA | 1321 |
| SEQ ID NO: 40 | UGCCUCCACCUUUGACAAGAAUU | 1323 |
| SEQ ID NO: 41 | ACCAUUAAGGUGCCCAUGAUGUA | 1285 |
| SEQ ID NO: 42 | AACUGCCCUACCAAGGAAAUGCC | 1364 |
| SEQ ID NO: 43 | CUCAAACUGCCCUACCAAGGAAA | 1360 |
| SEQ ID NO: 44 | CCUCAAACUGCCCUACCAAGGAA | 1359 |
| SEQ ID NO: 45 | GCCUCCACCUUUGACAAGAAUUU | 1324 |
| SEQ ID NO: 46 | GUCGACACUUUCCACCUGGACAA | 1255 |
| SEQ ID NO: 47 | ACACUUUCCACCUGGACAAGUAC | 1259 |
| SEQ ID NO: 48 | UCAAACUGCCCUACCAAGGAAAU | 1361 |
| SEQ ID NO: 49 | AAACUGCCCUACCAAGGAAAUGC | 1363 |
| SEQ ID NO: 50 | GACACUUUCCACCUGGACAAGUA | 1258 |
| SEQ ID NO: 51 | GACCAUUAAGGUGCCCAUGAUGU | 1284 |
| SEQ ID NO: 52 | GUUUGCCUCCACCUUUGACAAGA | 1320 |
| SEQ ID NO: 53 | ACUUUCCACCUGGACAAGUACAA | 1261 |
| SEQ ID NO: 54 | UGUCCUCAAACUGCCCUACCAAG | 1356 |
| SEQ ID NO: 55 | CAAACUGCCCUACCAAGGAAAUG | 1362 |
| SEQ ID NO: 56 | GUCCUCAAACUGCCCUACCAAGG | 1357 |
| SEQ ID NO: 57 | AUGUCCUCAAACUGCCCUACCAA | 1355 |
| SEQ ID NO: 58 | UCGACACUUUCCACCUGGACAAG | 1256 |
| SEQ ID NO: 59 | AGUUUGCCUCCACCUUUGACAAG | 1319 |
| SEQ ID NO: 60 | CGACACUUUCCACCUGGACAAGU | 1257 |
| SEQ ID NO: 61 | CUUUCCACCUGGACAAGUACAAG | 1262 |
| SEQ ID NO: 62 | CACUUUCCACCUGGACAAGUACA | 1260 |
| SEQ ID NO: 63 | UCCUCAAACUGCCCUACCAAGGA | 1358 |
| SEQ ID NO: 64 | GAUUACAUCUUGUUCAAAGGGAA | 1198 |
| SEQ ID NO: 65 | AAUGCCACCAUGCUGGUGGUCCU | 1381 |
| SEQ ID NO: 66 | UUUAUCCAAGAGGUAUUUUGAUA | 1038 |
| SEQ ID NO: 67 | GGAAAUGCCACCAUGCUGGUGGU | 1378 |
| SEQ ID NO: 68 | GGAUUACAUCUUGUUCAAAGGGA | 1197 |
| SEQ ID NO: 69 | AUCUCCAUGAGGCACGAUGGCAA | 766 |
| SEQ ID NO: 70 | AUUCCAUGCCUCCUGUCAUCAAA | 1721 |
| SEQ ID NO: 71 | UUAUUCCAUGCCUCCUGUCAUCA | 1719 |
| SEQ ID NO: 72 | ACCAAGGAAAUGCCACCAUGCUG | 1373 |
| SEQ ID NO: 73 | GCUGGUGGUCCUCAUGGAGAAAA | 1392 |
| SEQ ID NO: 74 | ACAUCUUGUUCAAAGGGAAAUGG | 1202 |
| SEQ ID NO: 75 | CCAAGGAAAUGCCACCAUGCUGG | 1374 |
| SEQ ID NO: 76 | UUGCCUCCACCUUUGACAAGAAU | 1322 |
| SEQ ID NO: 77 | GGGAGUUUUGCCUUCAUCCACAA | 985 |
| SEQ ID NO: 78 | CUGCUGCGAAAGAUCUCCAUGAG | 754 |
| SEQ ID NO: 79 | CAAGUUUGCCUCCACCUUUGACA | 1317 |
| SEQ ID NO: 80 | AAGUUUGCCUCCACCUUUGACAA | 1318 |
| SEQ ID NO: 81 | UACAUCUUGUUCAAAGGGAAAUG | 1201 |
| SEQ ID NO: 82 | GGGGAGUUUUGCCUUCAUCCACA | 984 |
| SEQ ID NO: 83 | UGCUGCGAAAGAUCUCCAUGAGG | 755 |
| SEQ ID NO: 84 | UUCCAUGCCUCCUGUCAUCAAAG | 1722 |
| SEQ ID NO: 85 | UCUGUUUCUGGGCAGGGUGGUGA | 1794 |
| SEQ ID NO: 86 | CAGCCUGCUGCGAAAGAUCUCCA | 750 |
| SEQ ID NO: 87 | CAAACUGUUUGAUGAGAUUAAUC | 1152 |
| SEQ ID NO: 88 | CCAUGCCUCCUGUCAUCAAAGUG | 1724 |
| SEQ ID NO: 89 | GAAGUAUGAGAUGCAUGAGCUGC | 1530 |
| SEQ ID NO: 90 | AGAAGUAUGAGAUGCAUGAGCUG | 1529 |
| SEQ ID NO: 91 | CAUGUCCUCAAACUGCCCUACCA | 1354 |
| SEQ ID NO: 92 | AAACUGUUUGAUGAGAUUAAUCC | 1153 |
| SEQ ID NO: 93 | AAGACCAUUAAGGUGCCCAUGAU | 1282 |
| SEQ ID NO: 94 | AGACCAUUAAGGUGCCCAUGAUG | 1283 |
| SEQ ID NO: 95 | CUGUUUCUGGGCAGGGUGGUGAA | 1795 |
| SEQ ID NO: 96 | GCUUCUGUUUCUGGGCAGGGUGG | 1791 |
| SEQ ID NO: 97 | AGUUUUCUUUCCGAAGUUCAAGC | 1500 |
| SEQ ID NO: 98 | GUUUUCUUUCCGAAGUUCAAGCU | 1501 |
| SEQ ID NO: 99 | CUUCUGUUUCUGGGCAGGGUGGU | 1792 |
| SEQ ID NO: 100 | UCAUGUCCUCAAACUGCCCUACC | 1353 |
| SEQ ID NO: 101 | AGUCGACACUUUCCACCUGGACA | 1254 |
| SEQ ID NO: 102 | CCUUCAUCCACAAGGAUUU | 995 |
| SEQ ID NO: 103 | CGAAAGAUCUCCAUGAGGC | 760 |
| SEQ ID NO: 104 | UGGUGGUCCUCAUGGAGAA | 1394 |
| SEQ ID NO: 105 | GAAAGAUCUCCAUGAGGCA | 761 |
| SEQ ID NO: 106 | AUGAGAUGCAUGAGCUGCU | 1535 |
| SEQ ID NO: 107 | UUGAUGAGAUUAAUCCUGA | 1160 |
| SEQ ID NO: 108 | AGAUUAAUCCUGAAACCAA | 1166 |
| SEQ ID NO: 109 | AUGAGAUUAAUCCUGAAAC | 1163 |
| SEQ ID NO: 110 | GAGAUUAAUCCUGAAACCA | 1165 |
| SEQ ID NO: 111 | UGAGAUUAAUCCUGAAACC | 1164 |
| SEQ ID NO: 112 | GUUUGAUGAGAUUAAUCCU | 1158 |
| SEQ ID NO: 113 | UUGCCUUCAUCCACAAGGA | 992 |
| SEQ ID NO: 114 | AAAGAUCUCCAUGAGGCAC | 762 |
| SEQ ID NO: 115 | CUGGUGGUCCUCAUGGAGA | 1393 |
| SEQ ID NO: 116 | UUCAUCCACAAGGAUUUUG | 997 |
| SEQ ID NO: 117 | AAGAUCUCCAUGAGGCACG | 763 |
| SEQ ID NO: 118 | CAUCCACAAGGAUUUUGAU | 999 |
| SEQ ID NO: 119 | UGAUGAGAUUAAUCCUGAA | 1161 |
| SEQ ID NO: 120 | GCCUUCAUCCACAAGGAUU | 994 |
| SEQ ID NO: 121 | UCUCCAUGAGGCACGAUGG | 767 |

[0887] Table 2 provides the unmodified first (antisense) and corresponding unmodified second (sense) strand sequences for siRNA oligonucleosides according to the present invention, together with the corresponding positions in the overall gene sequence of SEQ ID NO: 1 as follows.

TABLE 2

| | First (Antisense) | | Second (Sense) | |
|---|---|---|---|---|
| | Strand | | Strand Base | |
| | Base Sequence | | Sequence | |
| | 5′ → 3′ | | 5′ → 3′ | |
| | (Shown as | | (Shown as | |
| | an Unmodified | | an Unmodified | Corresponding |
| SEQ ID | Nucleoside | SEQ ID | Nucleoside | positions on |
| NO (AS) | Sequence) | NO (SS) | Sequence) | NM_016186.3 |
| SEQ ID | CAUGGUGGCAUUUCCUUGG | SEQ ID | UACCAAGGAAAUGCCAC | 1370-1391 |
| NO: 145 | UAGG | NO: 265 | CAUG | |
| SEQ ID | UCGUGCCUCAUGGAGAUCU | SEQ ID | AAAGAUCUCCAUGAGGC | 760-781 |
| NO: 148 | UUCG | NO: 268 | ACGA | |
| SEQ ID | AAAUCCUUGUGGAUGAAGG | SEQ ID | UGCCUUCAUCCACAAGG | 991-1012 |
| NO: 122 | CAAA | NO: 242 | AUUU | |
| SEQ ID | GCCUCAUGGAGAUCUUUCG | SEQ ID | UGCGAAAGAUCUCCAUG | 756-777 |
| NO: 123 | CAGC | NO: 243 | AGGC | |
| SEQ ID | UUCUCCAUGAGGACCACCA | SEQ ID | GCUGGUGGUCCUCAUGG | 1390-1411 |
| NO: 124 | GCAU | NO: 244 | AGAA | |
| SEQ ID | UGCCUCAUGGAGAUCUUUC | SEQ ID | GCGAAAGAUCUCCAUGA | 757-778 |
| NO: 125 | GCAG | NO: 245 | GGCA | |
| SEQ ID | AGCAGCUCAUGCAUCUCAU | SEQ ID | GUAUGAGAUGCAUGAGC | 1531-1552 |
| NO: 126 | ACUU | NO: 246 | UGCU | |
| SEQ ID | UCAGGAUUAAUCUCAUCAA | SEQ ID | GUUUGAUGAGAUUAAUC | 1156-1177 |
| NO: 127 | ACAG | NO: 247 | CUGA | |
| SEQ ID | UUGGUUUCAGGAUUAAUCU | SEQ ID | UGAGAUUAAUCCUGAAA | 1162-1183 |
| NO: 128 | CAUC | NO: 248 | CCAA | |
| SEQ ID | GUUUCAGGAUUAAUCUCAU | SEQ ID | UGAUGAGAUUAAUCCUG | 1159-1180 |
| NO: 129 | CAAA | NO: 249 | AAAC | |
| SEQ ID | UGGUUUCAGGAUUAAUCUC | SEQ ID | AUGAGAUUAAUCCUGAA | 1161-1182 |
| NO: 130 | AUCA | NO: 250 | ACCA | |
| SEQ ID | GGUUUCAGGAUUAAUCUCA | SEQ ID | GAUGAGAUUAAUCCUGA | 1160-1181 |
| NO: 131 | UCAA | NO: 251 | AACC | |
| SEQ ID | AGGAUUAAUCUCAUCAAAC | SEQ ID | CUGUUUGAUGAGAUUAA | 1154-1175 |
| NO: 132 | AGUU | NO: 252 | UCCU | |
| SEQ ID | UCCUUGUGGAUGAAGGCAA | SEQ ID | UUUUGCCUUCAUCCACA | 988-1009 |
| NO: 133 | AACU | NO: 253 | AGGA | |
| SEQ ID | GUGCCUCAUGGAGAUCUUU | SEQ ID | CGAAAGAUCUCCAUGAG | 758-779 |
| NO: 134 | CGCA | NO: 254 | GCAC | |
| SEQ ID | UCUCCAUGAGGACCACCAG | SEQ ID | UGCUGGUGGUCCUCAUG | 1389-1410 |
| NO: 135 | CAUG | NO: 255 | GAGA | |
| SEQ ID | CAAAAUCCUUGUGGAUGAA | SEQ ID | CCUUCAUCCACAAGGAU | 993-1014 |
| NO: 136 | GGCA | NO: 256 | UUUG | |
| SEQ ID | CGUGCCUCAUGGAGAUCUU | SEQ ID | GAAAGAUCUCCAUGAGG | 759-780 |
| NO: 137 | UCGC | NO: 257 | CACG | |
| SEQ ID | AUCAAAAUCCUUGUGGAUG | SEQ ID | UUCAUCCACAAGGAUUU | 995-1016 |
| NO: 138 | AAGG | NO: 258 | UGAU | |
| SEQ ID | UUCAGGAUUAAUCUCAUCA | SEQ ID | UUUGAUGAGAUUAAUCC | 1157-1178 |
| NO: 139 | AACA | NO: 259 | UGAA | |
| SEQ ID | AAUCCUUGUGGAUGAAGGC | SEQ ID | UUGCCUUCAUCCACAAG | 990-1011 |
| NO: 140 | AAAA | NO: 260 | GAUU | |
| SEQ ID | CCAUCGUGCCUCAUGGAGA | SEQ ID | GAUCUCCAUGAGGCACG | 763-784 |
| NO: 141 | UCUU | NO: 261 | AUGG | |
| SEQ ID | UCCAUGAGGACCACCAGCA | SEQ ID | CAUGCUGGUGGUCCUCA | 1387-1408 |
| NO: 142 | UGGU | NO: 262 | UGGA | |
| SEQ ID | AUCCUUGUGGAUGAAGGCA | SEQ ID | UUUGCCUUCAUCCACAA | 989-1010 |
| NO: 143 | AAAC | NO: 263 | GGAU | |
| SEQ ID | AAAAUCCUUGUGGAUGAAG | SEQ ID | GCCUUCAUCCACAAGGA | 992-1013 |
| NO: 144 | GCAA | NO: 264 | UUUU | |
| SEQ ID | UUUCAGGAUUAAUCUCAUC | SEQ ID | UUGAUGAGAUUAAUCCU | 1158-1179 |
| NO: 146 | AAAC | NO: 266 | GAAA | |
| SEQ ID | UCAAAAUCCUUGUGGAUGA | SEQ ID | CUUCAUCCACAAGGAUU | 994-1015 |
| NO: 147 | AGGC | NO: 267 | UUGA | |
| SEQ ID | CAGGAUUAAUCUCAUCAAA | SEQ ID | UGUUUGAUGAGAUUAAU | 1155-1176 |
| NO: 149 | CAGU | NO: 269 | CCUG | |
| SEQ ID | CUCCAUGAGGACCACCAGC | SEQ ID | AUGCUGGUGGUCCUCAU | 1388-1409 |
| NO: 150 | AUGG | NO: 270 | GGAG | |
| SEQ ID | CCUUGUGGAUGAAGGCAAA | SEQ ID | GUUUUGCCUUCAUCCAC | 987-1008 |
| NO: 151 | ACUC | NO: 271 | AAGG | |
| SEQ ID | UGAGGACCACCAGCAUGGU | SEQ ID | CCACCAUGCUGGUGGUC | 1383-1404 |
| NO: 152 | GGCA | NO: 272 | CUCA | |
| SEQ ID | AUGAGGACCACCAGCAUGG | SEQ ID | CACCAUGCUGGUGGUCC | 1384-1405 |
| NO: 153 | UGGC | NO: 273 | UCAU | |
| SEQ ID | AUCGUGCCUCAUGGAGAUC | SEQ ID | AAGAUCUCCAUGAGGCA | 761-782 |
| NO: 154 | UUUC | NO: 274 | CGAU | |
| SEQ ID | CUUGUGGAUGAAGGCAAAA | SEQ ID | AGUUUUGCCUUCAUCCA | 986-1007 |
| NO: 155 | CUCC | NO: 275 | CAAG | |
| SEQ ID | CAUGAGGACCACCAGCAUG | SEQ ID | ACCAUGCUGGUGGUCCU | 1385-1406 |
| NO: 156 | GUGG | NO: 276 | CAUG | |
| SEQ ID | CAUCGUGCCUCAUGGAGAU | SEQ ID | AGAUCUCCAUGAGGCAC | 762-783 |
| NO: 157 | CUUU | NO: 277 | GAUG | |
| SEQ ID | CCAUGAGGACCACCAGCAU | SEQ ID | CCAUGCUGGUGGUCCUC | 1386-1407 |
| NO: 158 | GGUG | NO: 278 | AUGG | |
| SEQ ID | UUCUUGUCAAAGGUGGAGG | SEQ ID | UGCCUCCACCUUUGACA | 1321-1342 |
| NO: 159 | CAAA | NO: 279 | AGAA | |
| SEQ ID | AAUUCUUGUCAAAGGUGGA | SEQ ID | CCUCCACCUUUGACAAG | 1323-1344 |
| NO: 160 | GGCA | NO: 280 | AAUU | |
| SEQ ID | UACAUCAUGGGCACCUUAA | SEQ ID | CAUUAAGGUGCCCAUGA | 1285-1306 |
| NO: 161 | UGGU | NO: 281 | UGUA | |
| SEQ ID | GGCAUUUCCUUGGUAGGGC | SEQ ID | CUGCCCUACCAAGGAAA | 1364-1385 |
| NO: 162 | AGUU | NO: 282 | UGCC | |
| SEQ ID | UUUCCUUGGUAGGGCAGUU | SEQ ID | CAAACUGCCCUACCAAG | 1360-1381 |
| NO: 163 | UGAG | NO: 283 | GAAA | |
| SEQ ID | UUCCUUGGUAGGGCAGUUU | SEQ ID | UCAAACUGCCCUACCAA | 1359-1380 |
| NO: 164 | GAGG | NO: 284 | GGAA | |
| SEQ ID | AAAUUCUUGUCAAAGGUGG | SEQ ID | CUCCACCUUUGACAAGA | 1324-1345 |
| NO: 165 | AGGC | NO: 285 | AUUU | |
| SEQ ID | UUGUCCAGGUGGAAAGUGU | SEQ ID | CGACACUUUCCACCUGG | 1255-1276 |
| NO: 166 | CGAC | NO: 286 | ACAA | |
| SEQ ID | GUACUUGUCCAGGUGGAAA | SEQ ID | ACUUUCCACCUGGACAA | 1259-1280 |
| NO: 167 | GUGU | NO: 287 | GUAC | |
| SEQ ID | AUUUCCUUGGUAGGGCAGU | SEQ ID | AAACUGCCCUACCAAGG | 1361-1382 |
| NO: 168 | UUGA | NO: 288 | AAAU | |
| SEQ ID | GCAUUUCCUUGGUAGGGCA | SEQ ID | ACUGCCCUACCAAGGAA | 1363-1384 |
| NO: 169 | GUUU | NO: 289 | AUGC | |
| SEQ ID | UACUUGUCCAGGUGGAAAG | SEQ ID | CACUUUCCACCUGGACA | 1258-1279 |
| NO: 170 | UGUC | NO: 290 | AGUA | |
| SEQ ID | ACAUCAUGGGCACCUUAAU | SEQ ID | CCAUUAAGGUGCCCAUG | 1284-1305 |
| NO: 171 | GGUC | NO: 291 | AUGU | |
| SEQ ID | UCUUGUCAAAGGUGGAGGC | SEQ ID | UUGCCUCCACCUUUGAC | 1320-1341 |
| NO: 172 | AAAC | NO: 292 | AAGA | |
| SEQ ID | UUGUACUUGUCCAGGUGGA | SEQ ID | UUUCCACCUGGACAAGU | 1261-1282 |
| NO: 173 | AAGU | NO: 293 | ACAA | |
| SEQ ID | CUUGGUAGGGCAGUUUGAG | SEQ ID | UCCUCAAACUGCCCUAC | 1356-1377 |
| NO: 174 | GACA | NO: 294 | CAAG | |
| SEQ ID | CAUUUCCUUGGUAGGGCAG | SEQ ID | AACUGCCCUACCAAGGA | 1362-1383 |
| NO: 175 | UUUG | NO: 295 | AAUG | |
| SEQ ID | CCUUGGUAGGGCAGUUUGA | SEQ ID | CCUCAAACUGCCCUACC | 1357-1378 |
| NO: 176 | GGAC | NO: 296 | AAGG | |
| SEQ ID | UUGGUAGGGCAGUUUGAGG | SEQ ID | GUCCUCAAACUGCCCUA | 1355-1376 |
| NO: 177 | ACAU | NO: 297 | CCAA | |
| SEQ ID | CUUGUCCAGGUGGAAAGUG | SEQ ID | GACACUUUCCACCUGGA | 1256-1277 |
| NO: 178 | UCGA | NO: 298 | CAAG | |
| SEQ ID | CUUGUCAAAGGUGGAGGCA | SEQ ID | UUUGCCUCCACCUUUGA | 1319-1340 |
| NO: 179 | AACU | NO: 299 | CAAG | |
| SEQ ID | ACUUGUCCAGGUGGAAAGU | SEQ ID | ACACUUUCCACCUGGAC | 1257-1278 |
| NO: 180 | GUCG | NO: 300 | AAGU | |
| SEQ ID | CUUGUACUUGUCCAGGUGG | SEQ ID | UUCCACCUGGACAAGUA | 1262-1283 |
| NO: 181 | AAAG | NO: 301 | CAAG | |
| SEQ ID | UGUACUUGUCCAGGUGGAA | SEQ ID | CUUUCCACCUGGACAAG | 1260-1281 |
| NO: 182 | AGUG | NO: 302 | UACA | |
| SEQ ID | UCCUUGGUAGGGCAGUUUG | SEQ ID | CUCAAACUGCCCUACCA | 1358-1379 |
| NO: 183 | AGGA | NO: 303 | AGGA | |
| SEQ ID | UUCCCUUUGAACAAGAUGU | SEQ ID | UUACAUCUUGUUCAAAG | 1198-1219 |
| NO: 184 | AAUC | NO: 304 | GGAA | |
| SEQ ID | AGGACCACCAGCAUGGUGG | SEQ ID | UGCCACCAUGCUGGUGG | 1381-1402 |
| NO: 185 | CAUU | NO: 305 | UCCU | |
| SEQ ID | UAUCAAAAUACCUCUUGGA | SEQ ID | UAUCCAAGAGGUAUUUU | 1038-1059 |
| NO: 186 | UAAA | NO: 306 | GAUA | |
| SEQ ID | ACCACCAGCAUGGUGGCAU | SEQ ID | AAAUGCCACCAUGCUGG | 1378-1399 |
| NO: 187 | UUCC | NO: 307 | UGGU | |
| SEQ ID | UCCCUUUGAACAAGAUGUA | SEQ ID | AUUACAUCUUGUUCAAA | 1197-1218 |
| NO: 188 | AUCC | NO: 308 | GGGA | |
| SEQ ID | UUGCCAUCGUGCCUCAUGG | SEQ ID | CUCCAUGAGGCACGAUG | 766-787 |
| NO: 189 | AGAU | NO: 309 | GCAA | |
| SEQ ID | UUUGAUGACAGGAGGCAUG | SEQ ID | UCCAUGCCUCCUGUCAU | 1721-1742 |
| NO: 190 | GAAU | NO: 310 | CAAA | |
| SEQ ID | UGAUGACAGGAGGCAUGGA | SEQ ID | AUUCCAUGCCUCCUGUC | 1719-1740 |
| NO: 191 | AUAA | NO: 311 | AUCA | |
| SEQ ID | CAGCAUGGUGGCAUUUCCU | SEQ ID | CAAGGAAAUGCCACCAU | 1373-1394 |
| NO: 192 | UGGU | NO: 312 | GCUG | |
| SEQ ID | UUUUCUCCAUGAGGACCAC | SEQ ID | UGGUGGUCCUCAUGGAG | 1392-1413 |
| NO: 193 | CAGC | NO: 313 | AAAA | |
| SEQ ID | CCAUUUCCCUUUGAACAAG | SEQ ID | AUCUUGUUCAAAGGGAA | 1202-1223 |
| NO: 194 | AUGU | NO: 314 | AUGG | |
| SEQ ID | CCAGCAUGGUGGCAUUUCC | SEQ ID | AAGGAAAUGCCACCAUG | 1374-1395 |
| NO: 195 | UUGG | NO: 315 | CUGG | |
| SEQ ID | AUUCUUGUCAAAGGUGGAG | SEQ ID | GCCUCCACCUUUGACAA | 1322-1343 |
| NO: 196 | GCAA | NO: 316 | GAAU | |
| SEQ ID | UUGUGGAUGAAGGCAAAAC | SEQ ID | GAGUUUUGCCUUCAUCC | 985-1006 |
| NO: 197 | UCCC | NO: 317 | ACAA | |
| SEQ ID | CUCAUGGAGAUCUUUCGCA | SEQ ID | GCUGCGAAAGAUCUCCA | 754-775 |
| NO: 198 | GCAG | NO: 318 | UGAG | |
| SEQ ID | UGUCAAAGGUGGAGGCAAA | SEQ ID | AGUUUGCCUCCACCUUU | 1317-1338 |
| NO: 199 | CUUG | NO: 319 | GACA | |
| SEQ ID | UUGUCAAAGGUGGAGGCAA | SEQ ID | GUUUGCCUCCACCUUUG | 1318-1339 |
| NO: 200 | ACUU | NO: 320 | ACAA | |
| SEQ ID | CAUUUCCCUUUGAACAAGA | SEQ ID | CAUCUUGUUCAAAGGGA | 1201-1222 |
| NO: 201 | UGUA | NO: 321 | AAUG | |
| SEQ ID | UGUGGAUGAAGGCAAAACU | SEQ ID | GGAGUUUUGCCUUCAUC | 984-1005 |
| NO: 202 | CCCC | NO: 322 | CACA | |
| SEQ ID | CCUCAUGGAGAUCUUUCGC | SEQ ID | CUGCGAAAGAUCUCCAU | 755-776 |
| NO: 203 | AGCA | NO: 323 | GAGG | |
| SEQ ID | CUUUGAUGACAGGAGGCAU | SEQ ID | CCAUGCCUCCUGUCAUC | 1722-1743 |
| NO: 204 | GGAA | NO: 324 | AAAG | |
| SEQ ID | UCACCACCCUGCCCAGAAA | SEQ ID | UGUUUCUGGGCAGGGUG | 1794-1815 |
| NO: 205 | CAGA | NO: 325 | GUGA | |
| SEQ ID | UGGAGAUCUUUCGCAGCAG | SEQ ID | GCCUGCUGCGAAAGAUC | 750-771 |
| NO: 206 | GCUG | NO: 326 | UCCA | |
| SEQ ID | GAUUAAUCUCAUCAAACAG | SEQ ID | AACUGUUUGAUGAGAUU | 1152-1173 |
| NO: 207 | UUUG | NO: 327 | AAUC | |
| SEQ ID | CACUUUGAUGACAGGAGGC | SEQ ID | AUGCCUCCUGUCAUCAA | 1724-1745 |
| NO: 208 | AUGG | NO: 328 | AGUG | |
| SEQ ID | GCAGCUCAUGCAUCUCAUA | SEQ ID | AGUAUGAGAUGCAUGAG | 1530-1551 |
| NO: 209 | CUUC | NO: 329 | CUGC | |
| SEQ ID | CAGCUCAUGCAUCUCAUAC | SEQ ID | AAGUAUGAGAUGCAUGA | 1529-1550 |
| NO: 210 | UUCU | NO: 330 | GCUG | |
| SEQ ID | UGGUAGGGCAGUUUGAGGA | SEQ ID | UGUCCUCAAACUGCCCU | 1354-1375 |
| NO: 211 | CAUG | NO: 331 | ACCA | |
| SEQ ID | GGAUUAAUCUCAUCAAACA | SEQ ID | ACUGUUUGAUGAGAUUA | 1153-1174 |
| NO: 212 | GUUU | NO: 332 | AUCC | |
| SEQ ID | AUCAUGGGCACCUUAAUGG | SEQ ID | GACCAUUAAGGUGCCCA | 1282-1303 |
| NO: 213 | UCUU | NO: 333 | UGAU | |
| SEQ ID | CAUCAUGGGCACCUUAAUG | SEQ ID | ACCAUUAAGGUGCCCAU | 1283-1304 |
| NO: 214 | GUCU | NO: 334 | GAUG | |
| SEQ ID | UUCACCACCCUGCCCAGAA | SEQ ID | GUUUCUGGGCAGGGUGG | 1795-1816 |
| NO: 215 | ACAG | NO: 335 | UGAA | |
| SEQ ID | CCACCCUGCCCAGAAACAG | SEQ ID | UUCUGUUUCUGGGCAGG | 1791-1812 |
| NO: 216 | AAGC | NO: 336 | GUGG | |
| SEQ ID | GCUUGAACUUCGGAAAGAA | SEQ ID | UUUUCUUUCCGAAGUUC | 1500-1521 |
| NO: 217 | AACU | NO: 337 | AAGC | |
| SEQ ID | AGCUUGAACUUCGGAAAGA | SEQ ID | UUUCUUUCCGAAGUUCA | 1501-1522 |
| NO: 218 | AAAC | NO: 338 | AGCU | |
| SEQ ID | ACCACCCUGCCCAGAAACA | SEQ ID | UCUGUUUCUGGGCAGGG | 1792-1813 |
| NO: 219 | GAAG | NO: 339 | UGGU | |
| SEQ ID | GGUAGGGCAGUUUGAGGAC | SEQ ID | AUGUCCUCAAACUGCCC | 1353-1374 |
| NO: 220 | AUGA | NO: 340 | UACC | |
| SEQ ID | UGUCCAGGUGGAAAGUGUC | SEQ ID | UCGACACUUUCCACCUG | 1254-1275 |
| NO: 221 | GACU | NO: 341 | GACA | |
| SEQ ID | AAAUCCUUGUGGAUGAAGG | SEQ ID | CCUUCAUCCACAAGGAU | 995-1014 |
| NO: 222 | | NO: 342 | UU | |
| SEQ ID | GCCUCAUGGAGAUCUUUCG | SEQ ID | CGAAAGAUCUCCAUGAG | 760-779 |
| NO: 223 | | NO: 343 | GC | |
| SEQ ID | UUCUCCAUGAGGACCACCA | SEQ ID | UGGUGGUCCUCAUGGAG | 1394-1413 |
| NO: 224 | | NO: 344 | AA | |
| SEQ ID | UGCCUCAUGGAGAUCUUUC | SEQ ID | GAAAGAUCUCCAUGAGG | 761-780 |
| NO: 225 | | NO: 345 | CA | |
| SEQ ID | AGCAGCUCAUGCAUCUCAU | SEQ ID | AUGAGAUGCAUGAGCUG | 1535-1554 |
| NO: 226 | | NO: 346 | CU | |
| SEQ ID | UCAGGAUUAAUCUCAUCAA | SEQ ID | UUGAUGAGAUUAAUCCU | 1160-1179 |
| NO: 227 | | NO: 347 | GA | |
| SEQ ID | UUGGUUUCAGGAUUAAUCU | SEQ ID | AGAUUAAUCCUGAAACC | 1166-1185 |
| NO: 228 | | NO: 348 | AA | |
| SEQ ID | GUUUCAGGAUUAAUCUCAU | SEQ ID | AUGAGAUUAAUCCUGAA | 1163-1182 |
| NO: 229 | | NO: 349 | AC | |
| SEQ ID | UGGUUUCAGGAUUAAUCUC | SEQ ID | GAGAUUAAUCCUGAAAC | 1165-1184 |
| NO: 230 | | NO: 350 | CA | |
| SEQ ID | GGUUUCAGGAUUAAUCUCA | SEQ ID | UGAGAUUAAUCCUGAAA | 1164-1183 |
| NO: 231 | | NO: 351 | CC | |
| SEQ ID | AGGAUUAAUCUCAUCAAAC | SEQ ID | GUUUGAUGAGAUUAAUC | 1158-1177 |
| NO: 232 | | NO: 352 | CU | |
| SEQ ID | UCCUUGUGGAUGAAGGCAA | SEQ ID | UUGCCUUCAUCCACAAG | 992-1011 |
| NO: 233 | | NO: 353 | GA | |
| SEQ ID | GUGCCUCAUGGAGAUCUUU | SEQ ID | AAAGAUCUCCAUGAGGC | 762-781 |
| NO: 234 | | NO: 354 | AC | |
| SEQ ID | UCUCCAUGAGGACCACCAG | SEQ ID | CUGGUGGUCCUCAUGGA | 1393-1412 |
| NO: 235 | | NO: 355 | GA | |
| SEQ ID | CAAAAUCCUUGUGGAUGAA | SEQ ID | UUCAUCCACAAGGAUUU | 997-1016 |
| NO: 236 | | NO: 356 | UG | |
| SEQ ID | CGUGCCUCAUGGAGAUCUU | SEQ ID | AAGAUCUCCAUGAGGCA | 763-782 |
| NO: 237 | | NO: 357 | CG | |
| SEQ ID | AUCAAAAUCCUUGUGGAUG | SEQ ID | CAUCCACAAGGAUUUUG | 999-1018 |
| NO: 238 | | NO: 358 | AU | |
| SEQ ID | UUCAGGAUUAAUCUCAUCA | SEQ ID | UGAUGAGAUUAAUCCUG | 1161-1180 |
| NO: 239 | | NO: 359 | AA | |
| SEQ ID | AAUCCUUGUGGAUGAAGGC | SEQ ID | GCCUUCAUCCACAAGGA | 994-1013 |
| NO: 240 | | NO: 360 | UU | |
| SEQ ID | CCAUCGUGCCUCAUGGAGA | SEQ ID | UCUCCAUGAGGCACGAU | 767-786 |
| NO: 241 | | NO: 361 | GG | |
| SEQ ID | AAAGUCCUUGUGGAUGAAG | SEQ ID | GCCUUCAUCCACAAGGA | NA |
| NO: 787 | GCAA | NO: 791 | CUUU | |
| SEQ ID | AACUUCUUGUCAAAGGUGG | SEQ ID | CUCCACCUUUGACAAGA | NA |
| NO: 788 | AGGC | NO: 792 | AGUU | |
| SEQ ID | UGUGGAUGAAGGCAAAGCU | SEQ ID | GUAGCUUUGCCUUCAUC | NA |
| NO: 789 | ACCC | NO: 793 | CACA | |

[0888] Table 3 provides the modified first (antisense) sequences. together with the corresponding unmodified first (antisense) sequences for siRNA oligonucleosides according to the present invention as follows.

TABLE 3

| | | | Underlying | |
|---|---|---|---|---|
| | | | Base Sequence | |
| | | | 5′ → 3′ | |
| | | | (Shown as | |
| | Modified First | SEQ ID | an Unmodified | SEQ ID |
| Antisense | (Antisense) Strand | NO (AS- | Nucleoside | NO (AS- |
| strand ID | 5′ → 3′ | mod) | Sequence) | unmod) |
| ETXS1036 | CmsAfsUmGfGmUfGmGmCmAmUmUm | SEQ ID | CAUGGUGGCAUUUCC | SEQ ID |
| | UmCfCmUfUmGmGmUmAmsGmsGm | NO: 764 | UUGGUAGG | NO: 145 |
| ETXS1040 | UmsCfsGmUfGmCfCmUmCmAmUmGm | SEQ ID | UCGUGCCUCAUGGAG | SEQ ID |
| | GmAfGmAfUmCmUmUmUmsCmsGm | NO: 766 | AUCUUUCG | NO: 148 |
| ETXS632 | AmsAfsAmUmCmCfUmUfGfUmGmGm | SEQ ID | AAAUCCUUGUGGAUG | SEQ ID |
| | AmUfGmAfAmGmGmCmAmsAmsAm | NO: 362 | AAGGCAAA | NO: 122 |
| ETXS634 | GmsCfsCmUmCmAfUmGfGfAmGmAm | SEQ ID | GCCUCAUGGAGAUCU | SEQ ID |
| | UmCfUmUfUmCmGmCmAmsGmsCm | NO: 363 | UUCGCAGC | NO: 123 |
| ETXS636 | UmsUfsCmUmCmCfAmUfGfAmGmGm | SEQ ID | UUCUCCAUGAGGACC | SEQ ID |
| | AmCfCmAfCmCmAmGmCmsAmsUm | NO: 364 | ACCAGCAU | NO: 124 |
| ETXS638 | UmsGfsCmCmUmCfAmUfGfGmAmGm | SEQ ID | UGCCUCAUGGAGAUC | SEQ ID |
| | AmUfCmUfUmUmCmGmCmsAmsGm | NO: 365 | UUUCGCAG | NO: 125 |
| ETXS640 | AmsGfsCmAmGmCfUmCfAfUmGmCm | SEQ ID | AGCAGCUCAUGCAUC | SEQ ID |
| | AmUfCmUfCmAmUmAmCmsUmsUm | NO: 366 | UCAUACUU | NO: 126 |
| ETXS642 | UmsCfsAmGmGmAfUmUfAfAmUmCm | SEQ ID | UCAGGAUUAAUCUCA | SEQ ID |
| | UmCfAmUfCmAmAmAmCmsAmsGm | NO: 367 | UCAAACAG | NO: 127 |
| ETXS644 | UmsUfsGmGmUmUfUmCfAfGmGmAm | SEQ ID | UUGGUUUCAGGAUUA | SEQ ID |
| | UmUfAmAfUmCmUmCmAmsUmsCm | NO: 368 | AUCUCAUC | NO: 128 |
| ETXS646 | GmsUfsUmUmCmAfGmGfAfUmUmAm | SEQ ID | GUUUCAGGAUUAAUC | SEQ ID |
| | AmUfCmUfCmAmUmCmAmsAmsAm | NO: 369 | UCAUCAAA | NO: 129 |
| ETXS648 | UmsGfsGmUmUmUfCmAfGfGmAmUm | SEQ ID | UGGUUUCAGGAUUAA | SEQ ID |
| | UmAfAmUfCmUmCmAmUmsCmsAm | NO: 370 | UCUCAUCA | NO: 130 |
| ETXS650 | GmsGfsUmUmUmCfAmGfGfAmUmUm | SEQ ID | GGUUUCAGGAUUAAU | SEQ ID |
| | AmAfUmCfUmCmAmUmCmsAmsAm | NO: 371 | CUCAUCAA | NO: 131 |
| ETXS652 | AmsGfsGmAmUmUfAmAfUfCmUmCm | SEQ ID | AGGAUUAAUCUCAUC | SEQ ID |
| | AmUfCmAfAmAmCmAmGmsUmsUm | NO: 372 | AAACAGUU | NO: 132 |
| ETXS654 | UmsCfsCmUmUmGfUmGfGfAmUmGm | SEQ ID | UCCUUGUGGAUGAAG | SEQ ID |
| | AmAfGmGfCmAmAmAmAmsCmsUm | NO: 373 | GCAAAACU | NO: 133 |
| ETXS656 | GmsUfsGmCmCmUfCmAfUfGmGmAm | SEQ ID | GUGCCUCAUGGAGAU | SEQ ID |
| | GmAfUmCfUmUmUmCmGmsCmsAm | NO: 374 | CUUUCGCA | NO: 134 |
| ETXS658 | UmsCfsUmCmCmAfUmGfAfGmGmAm | SEQ ID | UCUCCAUGAGGACCA | SEQ ID |
| | CmCfAmCfCmAmGmCmAmsUmsGm | NO: 375 | CCAGCAUG | NO: 135 |
| ETXS660 | CmsAfsAmAmAmUfCmCfUfUmGmUm | SEQ ID | CAAAAUCCUUGUGGA | SEQ ID |
| | GmGfAmUfGmAmAmGmGmsCmsAm | NO: 376 | UGAAGGCA | NO: 136 |
| ETXS662 | CmsGfsUmGmCmCfUmCfAfUmGmGm | SEQ ID | CGUGCCUCAUGGAGA | SEQ ID |
| | AmGfAmUfCmUmUmUmCmsGmsCm | NO: 377 | UCUUUCGC | NO: 137 |
| ETXS664 | AmsUfsCmAmAmAfAmUfCfCmUmUm | SEQ ID | AUCAAAAUCCUUGUG | SEQ ID |
| | GmUfGmGfAmUmGmAmAmsGmsGm | NO: 378 | GAUGAAGG | NO: 138 |
| ETXS666 | UmsUfsCmAmGmGfAmUfUfAmAmUm | SEQ ID | UUCAGGAUUAAUCUC | SEQ ID |
| | CmUfCmAfUmCmAmAmAmsCmsAm | NO: 379 | AUCAAACA | NO: 139 |
| ETXS668 | AmsAfsUmCmCmUfUmGfUfGmGmAm | SEQ ID | AAUCCUUGUGGAUGA | SEQ ID |
| | UmGfAmAfGmGmCmAmAmsAmsAm | NO: 380 | AGGCAAAA | NO: 140 |
| ETXS670 | CmsCfsAmUmCmGfUmGfCfCmUmCm | SEQ ID | CCAUCGUGCCUCAUG | SEQ ID |
| | AmUfGmGfAmGmAmUmCmsUmsUm | NO: 381 | GAGAUCUU | NO: 141 |
| ETXS672 | UmsCfsCmAmUmGfAmGfGfAmCmCm | SEQ ID | UCCAUGAGGACCACC | SEQ ID |
| | AmCfCmAfGmCmAmUmGmsGmsUm | NO: 382 | AGCAUGGU | NO: 142 |
| ETXS674 | AmsUfsCmCmUmUfGmUfGfGmAmUm | SEQ ID | AUCCUUGUGGAUGAA | SEQ ID |
| | GmAfAmGfGmCmAmAmAmsAmsCm | NO: 383 | GGCAAAAC | NO: 143 |
| ETXS676 | AmsAfsAmAmUmCfCmUfUfGmUmGm | SEQ ID | AAAAUCCUUGUGGAU | SEQ ID |
| | GmAfUmGfAmAmGmGmCmsAmsAm | NO: 384 | GAAGGCAA | NO: 144 |
| ETXS678 | CmsAfsUmGmGmUfGmGfCfAmUmUm | SEQ ID | CAUGGUGGCAUUUCC | SEQ ID |
| | UmCfCmUfUmGmGmUmAmsGmsGm | NO: 385 | UUGGUAGG | NO: 145 |
| ETXS680 | UmsUfsUmCmAmGfGmAfUfUmAmAm | SEQ ID | UUUCAGGAUUAAUCU | SEQ ID |
| | UmCfUmCfAmUmCmAmAmsAmsCm | NO: 386 | CAUCAAAC | NO: 146 |
| ETXS682 | UmsCfsAmAmAmAfUmCfCfUmUmGm | SEQ ID | UCAAAAUCCUUGUGG | SEQ ID |
| | UmGfGmAfUmGmAmAmGmsGmsCm | NO: 387 | AUGAAGGC | NO: 147 |
| ETXS684 | UmsCfsGmUmGmCfCmUfCfAmUmGm | SEQ ID | UCGUGCCUCAUGGAG | SEQ ID |
| | GmAfGmAfUmCmUmUmUmsCmsGm | NO: 388 | AUCUUUCG | NO: 148 |
| ETXS686 | CmsAfsGmGmAmUfUmAfAfUmCmUm | SEQ ID | CAGGAUUAAUCUCAU | SEQ ID |
| | CmAfUmCfAmAmAmCmAmsGmsUm | NO: 389 | CAAACAGU | NO: 149 |
| ETXS688 | CmsUfsCmCmAmUfGmAfGfGmAmCm | SEQ ID | CUCCAUGAGGACCAC | SEQ ID |
| | CmAfCmCfAmGmCmAmUmsGmsGm | NO: 390 | CAGCAUGG | NO: 150 |
| ETXS690 | CmsCfsUmUmGmUfGmGfAfUmGmAm | SEQ ID | CCUUGUGGAUGAAGG | SEQ ID |
| | AmGfGmCfAmAmAmAmCmsUmsCm | NO: 391 | CAAAACUC | NO: 151 |
| ETXS692 | UmsGfsAmGmGmAfCmCfAfCmCmAm | SEQ ID | UGAGGACCACCAGCA | SEQ ID |
| | GmCfAmUfGmGmUmGmGmsCmsAm | NO: 392 | UGGUGGCA | NO: 152 |
| ETXS694 | AmsUfsGmAmGmGfAmCfCfAmCmCm | SEQ ID | AUGAGGACCACCAGC | SEQ ID |
| | AmGfCmAfUmGmGmUmGmsGmsCm | NO: 393 | AUGGUGGC | NO: 153 |
| ETXS696 | AmsUfsCmGmUmGfCmCfUfCmAmUm | SEQ ID | AUCGUGCCUCAUGGA | SEQ ID |
| | GmGfAmGfAmUmCmUmUmsUmsCm | NO: 394 | GAUCUUUC | NO: 154 |
| ETXS698 | CmsUfsUmGmUmGfGmAfUfGmAmAm | SEQ ID | CUUGUGGAUGAAGGC | SEQ ID |
| | GmGfCmAfAmAmAmCmUmsCmsCm | NO: 395 | AAAACUCC | NO: 155 |
| ETXS700 | CmsAfsUmGmAmGfGmAfCfCmAmCm | SEQ ID | CAUGAGGACCACCAG | SEQ ID |
| | CmAfGmCfAmUmGmGmUmsGmsGm | NO: 396 | CAUGGUGG | NO: 156 |
| ETXS702 | CmsAfsUmCmGmUfGmCfCfUmCmAm | SEQ ID | CAUCGUGCCUCAUGG | SEQ ID |
| | UmGfGmAfGmAmUmCmUmsUmsUm | NO: 397 | AGAUCUUU | NO: 157 |
| ETXS704 | CmsCfsAmUmGmAfGmGfAfCmCmAm | SEQ ID | CCAUGAGGACCACCA | SEQ ID |
| | CmCfAmGfCmAmUmGmGmsUmsGm | NO: 398 | GCAUGGUG | NO: 158 |
| ETXS706 | UmsUfsCmUmUmGfUmCfAfAmAmGm | SEQ ID | UUCUUGUCAAAGGUG | SEQ ID |
| | GmUfGmGfAmGmGmCmAmsAmsAm | NO: 399 | GAGGCAAA | NO: 159 |
| ETXS708 | AmsAfsUmUmCmUfUmGfUfCmAmAm | SEQ ID | AAUUCUUGUCAAAGG | SEQ ID |
| | AmGfGmUfGmGmAmGmGmsCmsAm | NO: 400 | UGGAGGCA | NO: 160 |
| ETXS710 | UmsAfsCmAmUmCfAmUfGfGmGmCm | SEQ ID | UACAUCAUGGGCACC | SEQ ID |
| | AmCfCmUfUmAmAmUmGmsGmsUm | NO: 401 | UUAAUGGU | NO: 161 |
| ETXS712 | GmsGfsCmAmUmUfUmCfCfUmUmGm | SEQ ID | GGCAUUUCCUUGGUA | SEQ ID |
| | GmUfAmGfGmGmCmAmGmsUmsUm | NO: 402 | GGGCAGUU | NO: 162 |
| ETXS714 | UmsUfsUmCmCmUfUmGfGfUmAmGm | SEQ ID | UUUCCUUGGUAGGGC | SEQ ID |
| | GmGfCmAfGmUmUmUmGmsAmsGm | NO: 403 | AGUUUGAG | NO: 163 |
| ETXS716 | UmsUfsCmCmUmUfGmGfUfAmGmGm | SEQ ID | UUCCUUGGUAGGGCA | SEQ ID |
| | GmCfAmGfUmUmUmGmAmsGmsGm | NO: 404 | GUUUGAGG | NO: 164 |
| ETXS718 | AmsAfsAmUmUmCfUmUfGfUmCmAm | SEQ ID | AAAUUCUUGUCAAAG | SEQ ID |
| | AmAfGmGfUmGmGmAmGmsGmsCm | NO: 405 | GUGGAGGC | NO: 165 |
| ETXS720 | UmsUfsGmUmCmCfAmGfGfUmGmGm | SEQ ID | UUGUCCAGGUGGAAA | SEQ ID |
| | AmAfAmGfUmGmUmCmGmsAmsCm | NO: 406 | GUGUCGAC | NO: 166 |
| ETXS722 | GmsUfsAmCmUmUfGmUfCfCmAmGm | SEQ ID | GUACUUGUCCAGGUG | SEQ ID |
| | GmUfGmGfAmAmAmGmUmsGmsUm | NO: 407 | GAAAGUGU | NO: 167 |
| ETXS724 | AmsUfsUmUmCmCfUmUfGfGmUmAm | SEQ ID | AUUUCCUUGGUAGGG | SEQ ID |
| | GmGfGmCfAmGmUmUmUmsGmsAm | NO: 408 | CAGUUUGA | NO: 168 |
| ETXS726 | GmsCfsAmUmUmUfCmCfUfUmGmGm | SEQ ID | GCAUUUCCUUGGUAG | SEQ ID |
| | UmAfGmGfGmCmAmGmUmsUmsUm | NO: 409 | GGCAGUUU | NO: 169 |
| ETXS728 | UmsAfsCmUmUmGfUmCfCfAmGmGm | SEQ ID | UACUUGUCCAGGUGG | SEQ ID |
| | UmGfGmAfAmAmGmUmGmsUmsCm | NO: 410 | AAAGUGUC | NO: 170 |
| ETXS730 | AmsCfsAmUmCmAfUmGfGfGmCmAm | SEQ ID | ACAUCAUGGGCACCU | SEQ ID |
| | CmCfUmUfAmAmUmGmGmsUmsCm | NO: 411 | UAAUGGUC | NO: 171 |
| ETXS732 | UmsCfsUmUmGmUfCmAfAfAmGmGm | SEQ ID | UCUUGUCAAAGGUGG | SEQ ID |
| | UmGfGmAfGmGmCmAmAmsAmsCm | NO: 412 | AGGCAAAC | NO: 172 |
| ETXS734 | UmsUfsGmUmAmCfUmUfGfUmCmCm | SEQ ID | UUGUACUUGUCCAGG | SEQ ID |
| | AmGfGmUfGmGmAmAmAmsGmsUm | NO: 413 | UGGAAAGU | NO: 173 |
| ETXS736 | CmsUfsUmGmGmUfAmGfGfGmCmAm | SEQ ID | CUUGGUAGGGCAGUU | SEQ ID |
| | GmUfUmUfGmAmGmGmAmsCmsAm | NO: 414 | UGAGGACA | NO: 174 |
| ETXS738 | CmsAfsUmUmUmCfCmUfUfGmGmUm | SEQ ID | CAUUUCCUUGGUAGG | SEQ ID |
| | AmGfGmGfCmAmGmUmUmsUmsGm | NO: 415 | GCAGUUUG | NO: 175 |
| ETXS740 | CmsCfsUmUmGmGfUmAfGfGmGmCm | SEQ ID | CCUUGGUAGGGCAGU | SEQ ID |
| | AmGfUmUfUmGmAmGmGmsAmsCm | NO: 416 | UUGAGGAC | NO: 176 |
| ETXS742 | UmsUfsGmGmUmAfGmGfGfCmAmGm | SEQ ID | UUGGUAGGGCAGUUU | SEQ ID |
| | UmUfUmGfAmGmGmAmCmsAmsUm | NO: 417 | GAGGACAU | NO: 177 |
| ETXS744 | CmsUfsUmGmUmCfCmAfGfGmUmGm | SEQ ID | CUUGUCCAGGUGGAA | SEQ ID |
| | GmAfAmAfGmUmGmUmCmsGmsAm | NO: 418 | AGUGUCGA | NO: 178 |
| ETXS746 | CmsUfsUmGmUmCfAmAfAfGmGmUm | SEQ ID | CUUGUCAAAGGUGGA | SEQ ID |
| | GmGfAmGfGmCmAmAmAmsCmsUm | NO: 419 | GGCAAACU | NO: 179 |
| ETXS748 | AmsCfsUmUmGmUfCmCfAfGmGmUm | SEQ ID | ACUUGUCCAGGUGGA | SEQ ID |
| | GmGfAmAfAmGmUmGmUmsCmsGm | NO: 420 | AAGUGUCG | NO: 180 |
| ETXS750 | CmsUfsUmGmUmAfCmUfUfGmUmCm | SEQ ID | CUUGUACUUGUCCAG | SEQ ID |
| | CmAfGmGfUmGmGmAmAmsAmsGm | NO: 421 | GUGGAAAG | NO: 181 |
| ETXS752 | UmsGfsUmAmCmUfUmGfUfCmCmAm | SEQ ID | UGUACUUGUCCAGGU | SEQ ID |
| | GmGfUmGfGmAmAmAmGmsUmsGm | NO: 422 | GGAAAGUG | NO: 182 |
| ETXS754 | UmsCfsCmUmUmGfGmUfAfGmGmGm | SEQ ID | UCCUUGGUAGGGCAG | SEQ ID |
| | CmAfGmUfUmUmGmAmGmsGmsAm | NO: 423 | UUUGAGGA | NO: 183 |
| ETXS756 | UmsUfsCmCmCmUfUmUfGfAmAmCm | SEQ ID | UUCCCUUUGAACAAG | SEQ ID |
| | AmAfGmAfUmGmUmAmAmsUmsCm | NO: 424 | AUGUAAUC | NO: 184 |
| ETXS758 | AmsGfsGmAmCmCfAmCfCfAmGmCm | SEQ ID | AGGACCACCAGCAUG | SEQ ID |
| | AmUfGmGfUmGmGmCmAmsUmsUm | NO: 425 | GUGGCAUU | NO: 185 |
| ETXS760 | UmsAfsUmCmAmAfAmAfUfAmCmCm | SEQ ID | UAUCAAAAUACCUCU | SEQ ID |
| | UmCfUmUfGmGmAmUmAmsAmsAm | NO: 426 | UGGAUAAA | NO: 186 |
| ETXS762 | AmsCfsCmAmCmCfAmGfCfAmUmGm | SEQ ID | ACCACCAGCAUGGUG | SEQ ID |
| | GmUfGmGfCmAmUmUmUmsCmsCm | NO: 427 | GCAUUUCC | NO: 187 |
| ETXS764 | UmsCfsCmCmUmUfUmGfAfAmCmAm | SEQ ID | UCCCUUUGAACAAGA | SEQ ID |
| | AmGfAmUfGmUmAmAmUmsCmsCm | NO: 428 | UGUAAUCC | NO: 188 |
| ETXS766 | UmsUfsGmCmCmAfUmCfGfUmGmCm | SEQ ID | UUGCCAUCGUGCCUC | SEQ ID |
| | CmUfCmAfUmGmGmAmGmsAmsUm | NO: 429 | AUGGAGAU | NO: 189 |
| ETXS768 | UmsUfsUmGmAmUfGmAfCfAmGmGm | SEQ ID | UUUGAUGACAGGAGG | SEQ ID |
| | AmGfGmCfAmUmGmGmAmsAmsUm | NO: 430 | CAUGGAAU | NO: 190 |
| ETXS770 | UmsGfsAmUmGmAfCmAfGfGmAmGm | SEQ ID | UGAUGACAGGAGGCA | SEQ ID |
| | GmCfAmUfGmGmAmAmUmsAmsAm | NO: 431 | UGGAAUAA | NO: 191 |
| ETXS772 | CmsAfsGmCmAmUfGmGfUfGmGmCm | SEQ ID | CAGCAUGGUGGCAUU | SEQ ID |
| | AmUfUmUfCmCmUmUmGmsGmsUm | NO: 432 | UCCUUGGU | NO: 192 |
| ETXS774 | UmsUfsUmUmCmUfCmCfAfUmGmAm | SEQ ID | UUUUCUCCAUGAGGA | SEQ ID |
| | GmGfAmCfCmAmCmCmAmsGmsCm | NO: 433 | CCACCAGC | NO: 193 |
| ETXS776 | CmsCfsAmUmUmUfCmCfCfUmUmUm | SEQ ID | CCAUUUCCCUUUGAA | SEQ ID |
| | GmAfAmCfAmAmGmAmUmsGmsUm | NO: 434 | CAAGAUGU | NO: 194 |
| ETXS778 | CmsCfsAmGmCmAfUmGfGfUmGmGm | SEQ ID | CCAGCAUGGUGGCAU | SEQ ID |
| | CmAfUmUfUmCmCmUmUmsGmsGm | NO: 435 | UUCCUUGG | NO: 195 |
| ETXS780 | AmsUfsUmCmUmUfGmUfCfAmAmAm | SEQ ID | AUUCUUGUCAAAGGU | SEQ ID |
| | GmGfUmGfGmAmGmGmCmsAmsAm | NO: 436 | GGAGGCAA | NO: 196 |
| ETXS782 | UmsUfsGmUmGmGfAmUfGfAmAmGm | SEQ ID | UUGUGGAUGAAGGCA | SEQ ID |
| | GmCfAmAfAmAmCmUmCmsCmsCm | NO: 437 | AAACUCCC | NO: 197 |
| ETXS784 | CmsUfsCmAmUmGfGmAfGfAmUmCm | SEQ ID | CUCAUGGAGAUCUUU | SEQ ID |
| | UmUfUmCfGmCmAmGmCmsAmsGm | NO: 438 | CGCAGCAG | NO: 198 |
| ETXS786 | UmsGfsUmCmAmAfAmGfGfUmGmGm | SEQ ID | UGUCAAAGGUGGAGG | SEQ ID |
| | AmGfGmCfAmAmAmCmUmsUmsGm | NO: 439 | CAAACUUG | NO: 199 |
| ETXS788 | UmsUfsGmUmCmAfAmAfGfGmUmGm | SEQ ID | UUGUCAAAGGUGGAG | SEQ ID |
| | GmAfGmGfCmAmAmAmCmsUmsUm | NO: 440 | GCAAACUU | NO: 200 |
| ETXS790 | CmsAfsUmUmUmCfCmCfUfUmUmGm | SEQ ID | CAUUUCCCUUUGAAC | SEQ ID |
| | AmAfCmAfAmGmAmUmGmsUmsAm | NO: 441 | AAGAUGUA | NO: 201 |
| ETXS792 | UmsGfsUmGmGmAfUmGfAfAmGmGm | SEQ ID | UGUGGAUGAAGGCAA | SEQ ID |
| | CmAfAmAfAmCmUmCmCmsCmsCm | NO: 442 | AACUCCCC | NO: 202 |
| ETXS794 | CmsCfsUmCmAmUfGmGfAfGmAmUm | SEQ ID | CCUCAUGGAGAUCUU | SEQ ID |
| | CmUfUmUfCmGmCmAmGmsCmsAm | NO: 443 | UCGCAGCA | NO: 203 |
| ETXS796 | CmsUfsUmUmGmAfUmGfAfCmAmGm | SEQ ID | CUUUGAUGACAGGAG | SEQ ID |
| | GmAfGmGfCmAmUmGmGmsAmsAm | NO: 444 | GCAUGGAA | NO: 204 |
| ETXS798 | UmsCfsAmCmCmAfCmCfCfUmGmCm | SEQ ID | UCACCACCCUGCCCA | SEQ ID |
| | CmCfAmGfAmAmAmCmAmsGmsAm | NO: 445 | GAAACAGA | NO: 205 |
| ETXS800 | UmsGfsGmAmGmAfUmCfUfUmUmCm | SEQ ID | UGGAGAUCUUUCGCA | SEQ ID |
| | GmCfAmGfCmAmGmGmCmsUmsGm | NO: 446 | GCAGGCUG | NO: 206 |
| ETXS802 | GmsAfsUmUmAmAfUmCfUfCmAmUm | SEQ ID | GAUUAAUCUCAUCAA | SEQ ID |
| | CmAfAmAfCmAmGmUmUmsUmsGm | NO: 447 | ACAGUUUG | NO: 207 |
| ETXS804 | CmsAfsCmUmUmUfGmAfUfGmAmCm | SEQ ID | CACUUUGAUGACAGG | SEQ ID |
| | AmGfGmAfGmGmCmAmUmsGmsGm | NO: 448 | AGGCAUGG | NO: 208 |
| ETXS806 | GmsCfsAmGmCmUfCmAfUfGmCmAm | SEQ ID | GCAGCUCAUGCAUCU | SEQ ID |
| | UmCfUmCfAmUmAmCmUmsUmsCm | NO: 449 | CAUACUUC | NO: 209 |
| ETXS808 | CmsAfsGmCmUmCfAmUfGfCmAmUm | SEQ ID | CAGCUCAUGCAUCUC | SEQ ID |
| | CmUfCmAfUmAmCmUmUmsCmsUm | NO: 450 | AUACUUCU | NO: 210 |
| ETXS810 | UmsGfsGmUmAmGfGmGfCfAmGmUm | SEQ ID | UGGUAGGGCAGUUUG | SEQ ID |
| | UmUfGmAfGmGmAmCmAmsUmsGm | NO: 451 | AGGACAUG | NO: 211 |
| ETXS812 | GmsGfsAmUmUmAfAmUfCfUmCmAm | SEQ ID | GGAUUAAUCUCAUCA | SEQ ID |
| | UmCfAmAfAmCmAmGmUmsUmsUm | NO: 452 | AACAGUUU | NO: 212 |
| ETXS814 | AmsUfsCmAmUmGfGmGfCfAmCmCm | SEQ ID | AUCAUGGGCACCUUA | SEQ ID |
| | UmUfAmAfUmGmGmUmCmsUmsUm | NO: 453 | AUGGUCUU | NO: 213 |
| ETXS816 | CmsAfsUmCmAmUfGmGfGfCmAmCm | SEQ ID | CAUCAUGGGCACCUU | SEQ ID |
| | CmUfUmAfAmUmGmGmUmsCmsUm | NO: 454 | AAUGGUCU | NO: 214 |
| ETXS818 | UmsUfsCmAmCmCfAmCfCfCmUmGm | SEQ ID | UUCACCACCCUGCCC | SEQ ID |
| | CmCfCmAfGmAmAmAmCmsAmsGm | NO: 455 | AGAAACAG | NO: 215 |
| ETXS820 | CmsCfsAmCmCmCfUmGfCfCmCmAm | SEQ ID | CCACCCUGCCCAGAA | SEQ ID |
| | GmAfAmAfCmAmGmAmAmsGmsCm | NO: 456 | ACAGAAGC | NO: 216 |
| ETXS822 | GmsCfsUmUmGmAfAmCfUfUmCmGm | SEQ ID | GCUUGAACUUCGGAA | SEQ ID |
| | GmAfAmAfGmAmAmAmAmsCmsUm | NO: 457 | AGAAAACU | NO: 217 |
| ETXS824 | AmsGfsCmUmUmGfAmAfCfUmUmCm | SEQ ID | AGCUUGAACUUCGGA | SEQ ID |
| | GmGfAmAfAmGmAmAmAmsAmsCm | NO: 458 | AAGAAAAC | NO: 218 |
| ETXS826 | AmsCfsCmAmCmCfCmUfGfCmCmCm | SEQ ID | ACCACCCUGCCCAGA | SEQ ID |
| | AmGfAmAfAmCmAmGmAmsAmsGm | NO: 459 | AACAGAAG | NO: 219 |
| ETXS828 | GmsGfsUmAmGmGfGmCfAfGmUmUm | SEQ ID | GGUAGGGCAGUUUGA | SEQ ID |
| | UmGfAmGfGmAmCmAmUmsGmsAm | NO: 460 | GGACAUGA | NO: 220 |
| ETXS830 | UmsGfsUmCmCmAfGmGfUfGmGmAm | SEQ ID | UGUCCAGGUGGAAAG | SEQ ID |
| | AmAfGmUfGmUmCmGmAmsCmsUm | NO: 461 | UGUCGACU | NO: 221 |
| ETXS832 | AmsAfsAmUfCmCfUmUfGmUfGmGf | SEQ ID | AAAUCCUUGUGGAUG | SEQ ID |
| | AmUfGmAfAmsGfsGm | NO: 462 | AAGG | NO: 222 |
| ETXS834 | GmsCfsCmUfCmAfUmGfGmAfGmAf | SEQ ID | GCCUCAUGGAGAUCU | SEQ ID |
| | UmCfUmUfUmsCfsGm | NO: 463 | UUCG | NO: 223 |
| ETXS836 | UmsUfsCmUfCmCfAmUfGmAfGmGf | SEQ ID | UUCUCCAUGAGGACC | SEQ ID |
| | AmCfCmAfCmsCfsAm | NO: 464 | ACCA | NO: 224 |
| ETXS838 | UmsGfsCmCfUmCfAmUfGmGfAmGf | SEQ ID | UGCCUCAUGGAGAUC | SEQ ID |
| | AmUfCmUfUmsUfsCm | NO: 465 | UUUC | NO: 225 |
| ETXS840 | AmsGfsCmAfGmCfUmCfAmUfGmCf | SEQ ID | AGCAGCUCAUGCAUC | SEQ ID |
| | AmUfCmUfCmsAfsUm | NO: 466 | UCAU | NO: 226 |
| ETXS842 | UmsCfsAmGfGmAfUmUfAmAfUmCf | SEQ ID | UCAGGAUUAAUCUCA | SEQ ID |
| | UmCfAmUfCmsAfsAm | NO: 467 | UCAA | NO: 227 |
| ETXS844 | UmsUfsGmGfUmUfUmCfAmGfGmAf | SEQ ID | UUGGUUUCAGGAUUA | SEQ ID |
| | UmUfAmAfUmsCfsUm | NO: 468 | AUCU | NO: 228 |
| ETXS846 | GmsUfsUmUfCmAfGmGfAmUfUmAf | SEQ ID | GUUUCAGGAUUAAUC | SEQ ID |
| | AmUfCmUfCmsAfsUm | NO: 469 | UCAU | NO: 229 |
| ETXS848 | UmsGfsGmUfUmUfCmAfGmGfAmUf | SEQ ID | UGGUUUCAGGAUUAA | SEQ ID |
| | UmAfAmUfCmsUfsCm | NO: 470 | UCUC | NO: 230 |
| ETXS850 | GmsGfsUmUfUmCfAmGfGmAfUmUf | SEQ ID | GGUUUCAGGAUUAAU | SEQ ID |
| | AmAfUmCfUmsCfsAm | NO: 471 | CUCA | NO: 231 |
| ETXS852 | AmsGfsGmAfUmUfAmAfUmCfUmCf | SEQ ID | AGGAUUAAUCUCAUC | SEQ ID |
| | AmUfCmAfAmsAfsCm | NO: 472 | AAAC | NO: 232 |
| ETXS854 | UmsCfsCmUfUmGfUmGfGmAfUmGf | SEQ ID | UCCUUGUGGAUGAAG | SEQ ID |
| | AmAfGmGfCmsAfsAm | NO: 473 | GCAA | NO: 233 |
| ETXS856 | GmsUfsGmCfCmUfCmAfUmGfGmAf | SEQ ID | GUGCCUCAUGGAGAU | SEQ ID |
| | GmAfUmCfUmsUfsUm | NO: 474 | CUUU | NO: 234 |
| ETXS858 | UmsCfsUmCfCmAfUmGfAmGfGmAf | SEQ ID | UCUCCAUGAGGACCA | SEQ ID |
| | CmCfAmCfCmsAfsGm | NO: 475 | CCAG | NO: 235 |
| ETXS860 | CmsAfsAmAfAmUfCmCfUmUfGmUf | SEQ ID | CAAAAUCCUUGUGGA | SEQ ID |
| | GmGfAmUfGmsAfsAm | NO: 476 | UGAA | NO: 236 |
| ETXS862 | CmsGfsUmGfCmCfUmCfAmUfGmGf | SEQ ID | CGUGCCUCAUGGAGA | SEQ ID |
| | AmGfAmUfCmsUfsUm | NO: 477 | UCUU | NO: 237 |
| ETXS864 | AmsUfsCmAfAmAfAmUfCmCfUmUf | SEQ ID | AUCAAAAUCCUUGUG | SEQ ID |
| | GmUfGmGfAmsUfsGm | NO: 478 | GAUG | NO: 238 |
| ETXS866 | UmsUfsCmAfGmGfAmUfUmAfAmUf | SEQ ID | UUCAGGAUUAAUCUC | SEQ ID |
| | CmUfCmAfUmsCfsAm | NO: 479 | AUCA | NO: 239 |
| ETXS868 | AmsAfsUmCfCmUfUmGfUmGfGmAf | SEQ ID | AAUCCUUGUGGAUGA | SEQ ID |
| | UmGfAmAfGmsGfsCm | NO: 480 | AGGC | NO: 240 |
| ETXS870 | CmsCfsAmUfCmGfUmGfCmCfUmCf | SEQ ID | CCAUCGUGCCUCAUG | SEQ ID |
| | AmUfGmGfAmsGfsAm | NO: 481 | GAGA | NO: 241 |
| ETXS872 | AmsAfsAmUfCmCfUmUfGfUmGmGm | SEQ ID | AAAUCCUUGUGGAUG | SEQ ID |
| | AmUfGmAfAmGmGmCmAmsAmsAm | NO: 482 | AAGGCAAA | NO: 122 |
| ETXS874 | GmsCfsCmUfCmAfUmGfGfAmGmAm | SEQ ID | GCCUCAUGGAGAUCU | SEQ ID |
| | UmCfUmUfUmCmGmCmAmsGmsCm | NO: 483 | UUCGCAGC | NO: 123 |
| ETXS876 | UmsUfsCmUfCmCfAmUfGfAmGmGm | SEQ ID | UUCUCCAUGAGGACC | SEQ ID |
| | AmCfCmAfCmCmAmGmCmsAmsUm | NO: 484 | ACCAGCAU | NO: 124 |
| ETXS878 | UmsGfsCmCfUmCfAmUfGfGmAmGm | SEQ ID | UGCCUCAUGGAGAUC | SEQ ID |
| | AmUfCmUfUmUmCmGmCmsAmsGm | NO: 485 | UUUCGCAG | NO: 125 |
| ETXS880 | AmsGfsCmAfGmCfUmCfAfUmGmCm | SEQ ID | AGCAGCUCAUGCAUC | SEQ ID |
| | AmUfCmUfCmAmUmAmCmsUmsUm | NO: 486 | UCAUACUU | NO: 126 |
| ETXS882 | UmsCfsAmGfGmAfUmUfAfAmUmCm | SEQ ID | UCAGGAUUAAUCUCA | SEQ ID |
| | UmCfAmUfCmAmAmAmCmsAmsGm | NO: 487 | UCAAACAG | NO: 127 |
| ETXS884 | UmsUfsGmGfUmUfUmCfAfGmGmAm | SEQ ID | UUGGUUUCAGGAUUA | SEQ ID |
| | UmUfAmAfUmCmUmCmAmsUmsCm | NO: 488 | AUCUCAUC | NO: 128 |
| ETXS886 | GmsUfsUmUfCmAfGmGfAfUmUmAm | SEQ ID | GUUUCAGGAUUAAUC | SEQ ID |
| | AmUfCmUfCmAmUmCmAmsAmsAm | NO: 489 | UCAUCAAA | NO: 129 |
| ETXS888 | UmsGfsGmUfUmUfCmAfGfGmAmUm | SEQ ID | UGGUUUCAGGAUUAA | SEQ ID |
| | UmAfAmUfCmUmCmAmUmsCmsAm | NO: 490 | UCUCAUCA | NO: 130 |
| ETXS890 | GmsGfsUmUfUmCfAmGfGfAmUmUm | SEQ ID | GGUUUCAGGAUUAAU | SEQ ID |
| | AmAfUmCfUmCmAmUmCmsAmsAm | NO: 491 | CUCAUCAA | NO: 131 |
| ETXS892 | AmsGfsGmAfUmUfAmAfUfCmUmCm | SEQ ID | AGGAUUAAUCUCAUC | SEQ ID |
| | AmUfCmAfAmAmCmAmGmsUmsUm | NO: 492 | AAACAGUU | NO: 132 |
| ETXS894 | UmsCfsCmUfUmGfUmGfGfAmUmGm | SEQ ID | UCCUUGUGGAUGAAG | SEQ ID |
| | AmAfGmGfCmAmAmAmAmsCmsUm | NO: 493 | GCAAAACU | NO: 133 |
| ETXS896 | GmsUfsGmCfCmUfCmAfUfGmGmAm | SEQ ID | GUGCCUCAUGGAGAU | SEQ ID |
| | GmAfUmCfUmUmUmCmGmsCmsAm | NO: 494 | CUUUCGCA | NO: 134 |
| ETXS898 | UmsCfsUmCfCmAfUmGfAfGmGmAm | SEQ ID | UCUCCAUGAGGACCA | SEQ ID |
| | CmCfAmCfCmAmGmCmAmsUmsGm | NO: 495 | CCAGCAUG | NO: 135 |
| ETXS900 | CmsAfsAmAfAmUfCmCfUfUmGmUm | SEQ ID | CAAAAUCCUUGUGGA | SEQ ID |
| | GmGfAmUfGmAmAmGmGmsCmsAm | NO: 496 | UGAAGGCA | NO: 136 |
| ETXS902 | CmsGfsUmGfCmCfUmCfAfUmGmGm | SEQ ID | CGUGCCUCAUGGAGA | SEQ ID |
| | AmGfAmUfCmUmUmUmCmsGmsCm | NO: 497 | UCUUUCGC | NO: 137 |
| ETXS904 | AmsUfsCmAfAmAfAmUfCfCmUmUm | SEQ ID | AUCAAAAUCCUUGUG | SEQ ID |
| | GmUfGmGfAmUmGmAmAmsGmsGm | NO: 498 | GAUGAAGG | NO: 138 |
| ETXS906 | UmsUfsCmAfGmGfAmUfUfAmAmUm | SEQ ID | UUCAGGAUUAAUCUC | SEQ ID |
| | CmUfCmAfUmCmAmAmAmsCmsAm | NO: 499 | AUCAAACA | NO: 139 |
| ETXS908 | AmsAfsUmCfCmUfUmGfUfGmGmAm | SEQ ID | AAUCCUUGUGGAUGA | SEQ ID |
| | UmGfAmAfGmGmCmAmAmsAmsAm | NO: 500 | AGGCAAAA | NO: 140 |
| ETXS910 | CmsCfsAmUfCmGfUmGfCfCmUmCm | SEQ ID | CCAUCGUGCCUCAUG | SEQ ID |
| | AmUfGmGfAmGmAmUmCmsUmsUm | NO: 501 | GAGAUCUU | NO: 141 |
| ETXS912 | AmsAfsAmUfCmCfUmUfGfUmGmGm | SEQ ID | AAAUCCUUGUGGAUG | SEQ ID |
| | AmUfGmAfAmGmGmCmAmsAmsAm | NO: 502 | AAGGCAAA | NO: 122 |
| ETXS914 | GmsCfsCmUfCmAfUmGfGfAmGmAm | SEQ ID | GCCUCAUGGAGAUCU | SEQ ID |
| | UmCfUmUfUmCmGmCmAmsGmsCm | NO: 503 | UUCGCAGC | NO: 123 |
| ETXS916 | UmsUfsCmUfCmCfAmUfGfAmGmGm | SEQ ID | UUCUCCAUGAGGACC | SEQ ID |
| | AmCfCmAfCmCmAmGmCmsAmsUm | NO: 504 | ACCAGCAU | NO: 124 |
| ETXS918 | UmsGfsCmCfUmCfAmUfGfGmAmGm | SEQ ID | UGCCUCAUGGAGAUC | SEQ ID |
| | AmUfCmUfUmUmCmGmCmsAmsGm | NO: 505 | UUUCGCAG | NO: 125 |
| ETXS920 | AmsGfsCmAfGmCfUmCfAfUmGmCm | SEQ ID | AGCAGCUCAUGCAUC | SEQ ID |
| | AmUfCmUfCmAmUmAmCmsUmsUm | NO: 506 | UCAUACUU | NO: 126 |
| ETXS922 | UmsCfsAmGfGmAfUmUfAfAmUmCm | SEQ ID | UCAGGAUUAAUCUCA | SEQ ID |
| | UmCfAmUfCmAmAmAmCmsAmsGm | NO: 507 | UCAAACAG | NO: 127 |
| ETXS924 | UmsUfsGmGfUmUfUmCfAfGmGmAm | SEQ ID | UUGGUUUCAGGAUUA | SEQ ID |
| | UmUfAmAfUmCmUmCmAmsUmsCm | NO: 508 | AUCUCAUC | NO: 128 |
| ETXS926 | GmsUfsUmUfCmAfGmGfAfUmUmAm | SEQ ID | GUUUCAGGAUUAAUC | SEQ ID |
| | AmUfCmUfCmAmUmCmAmsAmsAm | NO: 509 | UCAUCAAA | NO: 129 |
| ETXS928 | UmsGfsGmUfUmUfCmAfGfGmAmUm | SEQ ID | UGGUUUCAGGAUUAA | SEQ ID |
| | UmAfAmUfCmUmCmAmUmsCmsAm | NO: 510 | UCUCAUCA | NO: 130 |
| ETXS930 | GmsGfsUmUfUmCfAmGfGfAmUmUm | SEQ ID | GGUUUCAGGAUUAAU | SEQ ID |
| | AmAfUmCfUmCmAmUmCmsAmsAm | NO: 511 | CUCAUCAA | NO: 131 |
| ETXS932 | AmsGfsGmAfUmUfAmAfUfCmUmCm | SEQ ID | AGGAUUAAUCUCAUC | SEQ ID |
| | AmUfCmAfAmAmCmAmGmsUmsUm | NO: 512 | AAACAGUU | NO: 132 |
| ETXS934 | UmsCfsCmUfUmGfUmGfGfAmUmGm | SEQ ID | UCCUUGUGGAUGAAG | SEQ ID |
| | AmAfGmGfCmAmAmAmAmsCmsUm | NO: 513 | GCAAAACU | NO: 133 |
| ETXS936 | GmsUfsGmCfCmUfCmAfUfGmGmAm | SEQ ID | GUGCCUCAUGGAGAU | SEQ ID |
| | GmAfUmCfUmUmUmCmGmsCmsAm | NO: 514 | CUUUCGCA | NO: 134 |
| ETXS938 | UmsCfsUmCfCmAfUmGfAfGmGmAm | SEQ ID | UCUCCAUGAGGACCA | SEQ ID |
| | CmCfAmCfCmAmGmCmAmsUmsGm | NO: 515 | CCAGCAUG | NO: 135 |
| ETXS940 | CmsAfsAmAfAmUfCmCfUfUmGmUm | SEQ ID | CAAAAUCCUUGUGGA | SEQ ID |
| | GmGfAmUfGmAmAmGmGmsCmsAm | NO: 516 | UGAAGGCA | NO: 136 |
| ETXS942 | CmsGfsUmGfCmCfUmCfAfUmGmGm | SEQ ID | CGUGCCUCAUGGAGA | SEQ ID |
| | AmGfAmUfCmUmUmUmCmsGmsCm | NO: 517 | UCUUUCGC | NO: 137 |
| ETXS944 | AmsUfsCmAfAmAfAmUfCfCmUmUm | SEQ ID | AUCAAAAUCCUUGUG | SEQ ID |
| | GmUfGmGfAmUmGmAmAmsGmsGm | NO: 518 | GAUGAAGG | NO: 138 |
| ETXS946 | UmsUfsCmAfGmGfAmUfUfAmAmUm | SEQ ID | UUCAGGAUUAAUCUC | SEQ ID |
| | CmUfCmAfUmCmAmAmAmsCmsAm | NO: 519 | AUCAAACA | NO: 139 |
| ETXS948 | AmsAfsUmCfCmUfUmGfUfGmGmAm | SEQ ID | AAUCCUUGUGGAUGA | SEQ ID |
| | UmGfAmAfGmGmCmAmAmsAmsAm | NO: 520 | AGGCAAAA | NO: 140 |
| ETXS950 | CmsCfsAmUfCmGfUmGfCfCmUmCm | SEQ ID | CCAUCGUGCCUCAUG | SEQ ID |
| | AmUfGmGfAmGmAmUmCmsUmsUm | NO: 521 | GAGAUCUU | NO: 141 |
| ETXS952 | AmsAfsAmUfCmCfUmUfGfUmGmGm | SEQ ID | AAAUCCUUGUGGAUG | SEQ ID |
| | AmUfGmAfAmGmGmCmAmsAmsAm | NO: 522 | AAGGCAAA | NO: 122 |
| ETXS954 | GmsCfsCmUfCmAfUmGfGfAmGmAm | SEQ ID | GCCUCAUGGAGAUCU | SEQ ID |
| | UmCfUmUfUmCmGmCmAmsGmsCm | NO: 523 | UUCGCAGC | NO: 123 |
| ETXS956 | UmsUfsCmUfCmCfAmUfGfAmGmGm | SEQ ID | UUCUCCAUGAGGACC | SEQ ID |
| | AmCfCmAfCmCmAmGmCmsAmsUm | NO: 524 | ACCAGCAU | NO: 124 |
| ETXS958 | UmsGfsCmCfUmCfAmUfGfGmAmGm | SEQ ID | UGCCUCAUGGAGAUC | SEQ ID |
| | AmUfCmUfUmUmCmGmCmsAmsGm | NO: 525 | UUUCGCAG | NO: 125 |
| ETXS960 | AmsGfsCmAfGmCfUmCfAfUmGmCm | SEQ ID | AGCAGCUCAUGCAUC | SEQ ID |
| | AmUfCmUfCmAmUmAmCmsUmsUm | NO: 526 | UCAUACUU | NO: 126 |
| ETXS962 | UmsCfsAmGfGmAfUmUfAfAmUmCm | SEQ ID | UCAGGAUUAAUCUCA | SEQ ID |
| | UmCfAmUfCmAmAmAmCmsAmsGm | NO: 527 | UCAAACAG | NO: 127 |
| ETXS964 | UmsUfsGmGfUmUfUmCfAfGmGmAm | SEQ ID | UUGGUUUCAGGAUUA | SEQ ID |
| | UmUfAmAfUmCmUmCmAmsUmsCm | NO: 528 | AUCUCAUC | NO: 128 |
| ETXS966 | GmsUfsUmUfCmAfGmGfAfUmUmAm | SEQ ID | GUUUCAGGAUUAAUC | SEQ ID |
| | AmUfCmUfCmAmUmCmAmsAmsAm | NO: 529 | UCAUCAAA | NO: 129 |
| ETXS968 | UmsGfsGmUfUmUfCmAfGfGmAmUm | SEQ ID | UGGUUUCAGGAUUAA | SEQ ID |
| | UmAfAmUfCmUmCmAmUmsCmsAm | NO: 530 | UCUCAUCA | NO: 130 |
| ETXS970 | GmsGfsUmUfUmCfAmGfGfAmUmUm | SEQ ID | GGUUUCAGGAUUAAU | SEQ ID |
| | AmAfUmCfUmCmAmUmCmsAmsAm | NO: 531 | CUCAUCAA | NO: 131 |
| ETXS972 | AmsGfsGmAfUmUfAmAfUfCmUmCm | SEQ ID | AGGAUUAAUCUCAUC | SEQ ID |
| | AmUfCmAfAmAmCmAmGmsUmsUm | NO: 532 | AAACAGUU | NO: 132 |
| ETXS974 | UmsCfsCmUfUmGfUmGfGfAmUmGm | SEQ ID | UCCUUGUGGAUGAAG | SEQ ID |
| | AmAfGmGfCmAmAmAmAmsCmsUm | NO: 533 | GCAAAACU | NO: 133 |
| ETXS976 | GmsUfsGmCfCmUfCmAfUfGmGmAm | SEQ ID | GUGCCUCAUGGAGAU | SEQ ID |
| | GmAfUmCfUmUmUmCmGmsCmsAm | NO: 534 | CUUUCGCA | NO: 134 |
| ETXS978 | UmsCfsUmCfCmAfUmGfAfGmGmAm | SEQ ID | UCUCCAUGAGGACCA | SEQ ID |
| | CmCfAmCfCmAmGmCmAmsUmsGm | NO: 535 | CCAGCAUG | NO: 135 |
| ETXS980 | CmsAfsAmAfAmUfCmCfUfUmGmUm | SEQ ID | CAAAAUCCUUGUGGA | SEQ ID |
| | GmGfAmUfGmAmAmGmGmsCmsAm | NO: 536 | UGAAGGCA | NO: 136 |
| ETXS982 | CmsGfsUmGfCmCfUmCfAfUmGmGm | SEQ ID | CGUGCCUCAUGGAGA | SEQ ID |
| | AmGfAmUfCmUmUmUmCmsGmsCm | NO: 537 | UCUUUCGC | NO: 137 |
| ETXS984 | AmsUfsCmAfAmAfAmUfCfCmUmUm | SEQ ID | AUCAAAAUCCUUGUG | SEQ ID |
| | GmUfGmGfAmUmGmAmAmsGmsGm | NO: 538 | GAUGAAGG | NO: 138 |
| ETXS986 | UmsUfsCmAfGmGfAmUfUfAmAmUm | SEQ ID | UUCAGGAUUAAUCUC | SEQ ID |
| | CmUfCmAfUmCmAmAmAmsCmsAm | NO: 539 | AUCAAACA | NO: 139 |
| ETXS988 | AmsAfsUmCfCmUfUmGfUfGmGmAm | SEQ ID | AAUCCUUGUGGAUGA | SEQ ID |
| | UmGfAmAfGmGmCmAmAmsAmsAm | NO: 540 | AGGCAAAA | NO: 140 |
| ETXS990 | CmsCfsAmUfCmGfUmGfCfCmUmCm | SEQ ID | CCAUCGUGCCUCAUG | SEQ ID |
| | AmUfGmGfAmGmAmUmCmsUmsUm | NO: 541 | GAGAUCUU | NO: 141 |
| ETXS992 | AmsAfsAmUfCmCfUmUmGmUmGmGm | SEQ ID | AAAUCCUUGUGGAUG | SEQ ID |
| | AmUfGmAfAmGmGmCmAmsAmsAm | NO: 542 | AAGGCAAA | NO: 122 |
| ETXS994 | GmsCfsCmUfCmAfUmGmGmAmGmAm | SEQ ID | GCCUCAUGGAGAUCU | SEQ ID |
| | UmCfUmUfUmCmGmCmAmsGmsCm | NO: 543 | UUCGCAGC | NO: 123 |
| ETXS996 | UmsUfsCmUfCmCfAmUmGmAmGmGm | SEQ ID | UUCUCCAUGAGGACC | SEQ ID |
| | AmCfCmAfCmCmAmGmCmsAmsUm | NO: 544 | ACCAGCAU | NO: 124 |
| ETXS998 | UmsGfsCmCfUmCfAmUmGmGmAmGm | SEQ ID | UGCCUCAUGGAGAUC | SEQ ID |
| | AmUfCmUfUmUmCmGmCmsAmsGm | NO: 545 | UUUCGCAG | NO: 125 |
| ETXS1000 | AmsGfsCmAfGmCfUmCmAmUmGmCm | SEQ ID | AGCAGCUCAUGCAUC | SEQ ID |
| | AmUfCmUfCmAmUmAmCmsUmsUm | NO: 546 | UCAUACUU | NO: 126 |
| ETXS1002 | UmsCfsAmGfGmAfUmUmAmAmUmCm | SEQ ID | UCAGGAUUAAUCUCA | SEQ ID |
| | UmCfAmUfCmAmAmAmCmsAmsGm | NO: 547 | UCAAACAG | NO: 127 |
| ETXS1004 | UmsUfsGmGfUmUfUmCmAmGmGmAm | SEQ ID | UUGGUUUCAGGAUUA | SEQ ID |
| | UmUfAmAfUmCmUmCmAmsUmsCm | NO: 548 | AUCUCAUC | NO: 128 |
| ETXS1006 | GmsUfsUmUfCmAfGmGmAmUmUmAm | SEQ ID | GUUUCAGGAUUAAUC | SEQ ID |
| | AmUfCmUfCmAmUmCmAmsAmsAm | NO: 549 | UCAUCAAA | NO: 129 |
| ETXS1008 | UmsGfsGmUfUmUfCmAmGmGmAmUm | SEQ ID | UGGUUUCAGGAUUAA | SEQ ID |
| | UmAfAmUfCmUmCmAmUmsCmsAm | NO: 550 | UCUCAUCA | NO: 130 |
| ETXS1010 | GmsGfsUmUfUmCfAmGmGmAmUmUm | SEQ ID | GGUUUCAGGAUUAAU | SEQ ID |
| | AmAfUmCfUmCmAmUmCmsAmsAm | NO: 551 | CUCAUCAA | NO: 131 |
| ETXS1012 | AmsGfsGmAfUmUfAmAmUmCmUmCm | SEQ ID | AGGAUUAAUCUCAUC | SEQ ID |
| | AmUfCmAfAmAmCmAmGmsUmsUm | NO: 552 | AAACAGUU | NO: 132 |
| ETXS1014 | UmsCfsCmUfUmGfUmGmGmAmUmGm | SEQ ID | UCCUUGUGGAUGAAG | SEQ ID |
| | AmAfGmGfCmAmAmAmAmsCmsUm | NO: 553 | GCAAAACU | NO: 133 |
| ETXS1016 | GmsUfsGmCfCmUfCmAmUmGmGmAm | SEQ ID | GUGCCUCAUGGAGAU | SEQ ID |
| | GmAfUmCfUmUmUmCmGmsCmsAm | NO: 554 | CUUUCGCA | NO: 134 |
| ETXS1018 | UmsCfsUmCfCmAfUmGmAmGmGmAm | SEQ ID | UCUCCAUGAGGACCA | SEQ ID |
| | CmCfAmCfCmAmGmCmAmsUmsGm | NO: 555 | CCAGCAUG | NO: 135 |
| ETXS1020 | CmsAfsAmAfAmUfCmCmUmUmGmUm | SEQ ID | CAAAAUCCUUGUGGA | SEQ ID |
| | GmGfAmUfGmAmAmGmGmsCmsAm | NO: 556 | UGAAGGCA | NO: 136 |
| ETXS1022 | CmsGfsUmGfCmCfUmCmAmUmGmGm | SEQ ID | CGUGCCUCAUGGAGA | SEQ ID |
| | AmGfAmUfCmUmUmUmCmsGmsCm | NO: 557 | UCUUUCGC | NO: 137 |
| ETXS1024 | AmsUfsCmAfAmAfAmUmCmCmUmUm | SEQ ID | AUCAAAAUCCUUGUG | SEQ ID |
| | GmUfGmGfAmUmGmAmAmsGmsGm | NO: 558 | GAUGAAGG | NO: 138 |
| ETXS1026 | UmsUfsCmAfGmGfAmUmUmAmAmUm | SEQ ID | UUCAGGAUUAAUCUC | SEQ ID |
| | CmUfCmAfUmCmAmAmAmsCmsAm | NO: 559 | AUCAAACA | NO: 139 |
| ETXS1028 | AmsAfsUmCfCmUfUmGmUmGmGmAm | SEQ ID | AAUCCUUGUGGAUGA | SEQ ID |
| | UmGfAmAfGmGmCmAmAmsAmsAm | NO: 560 | AGGCAAAA | NO: 140 |
| ETXS1030 | CmsCfsAmUfCmGfUmGmCmCmUmCm | SEQ ID | CCAUCGUGCCUCAUG | SEQ ID |
| | AmUfGmGfAmGmAmUmCmsUmsUm | NO: 561 | GAGAUCUU | NO: 141 |
| ETXS1032 | AmsAfsAmAfUmCfCmUmUmGmUmGm | SEQ ID | AAAAUCCUUGUGGAU | SEQ ID |
| | GmAfUmGfAmAmGmGmCmsAmsAm | NO: 762 | GAAGGCAA | NO: 144 |
| ETXS1034 | AmsAfsAmAmUmCfCmUmUfGmUmGm | SEQ ID | AAAAUCCUUGUGGAU | SEQ ID |
| | GmAfUmGfAmAmGmGmCmsAmsAm | NO: 763 | GAAGGCAA | NO: 144 |
| ETXS1038 | CmsAfsUmGmGmUfGmGmCfAmUmUm | SEQ ID | CAUGGUGGCAUUUCC | SEQ ID |
| | UmCfCmUfUmGmGmUmAmsGmsGm | NO: 765 | UUGGUAGG | NO: 145 |
| ETXS1042 | UmsCfsGmUmGmCfCmUmCfAmUmGm | SEQ ID | UCGUGCCUCAUGGAG | SEQ ID |
| | GmAfGmAfUmCmUmUmUmsCmsGm | NO: 767 | AUCUUUCG | NO: 148 |
| ETXS1044 | AmsAfsAmUfUmCfUmUmGmUmCmAm | SEQ ID | AAAUUCUUGUCAAAG | SEQ ID |
| | AmAfGmGfUmGmGmAmGmsGmsCm | NO: 768 | GUGGAGGC | NO: 165 |
| ETXS1046 | AmsAfsAmUmUmCfUmUmGfUmCmAm | SEQ ID | AAAUUCUUGUCAAAG | SEQ ID |
| | AmAfGmGfUmGmGmAmGmsGmsCm | NO: 769 | GUGGAGGC | NO: 165 |
| ETXS1048 | UmsGfsUmGfGmAfUmGmAmAmGmGm | SEQ ID | UGUGGAUGAAGGCAA | SEQ ID |
| | CmAfAmAfAmCmUmCmCmsCmsCm | NO: 770 | AACUCCCC | NO: 202 |
| ETXS1050 | UmsGfsUmGmGmAfUmGmAfAmGmGm | SEQ ID | UGUGGAUGAAGGCAA | SEQ ID |
| | CmAfAmAfAmCmUmCmCmsCmsCm | NO: 771 | AACUCCCC | NO: 202 |
| ETXS1051 | AmsAfsAmAmUmCfCmUmUmGmUmGm | SEQ ID | AAAAUCCUUGUGGAU | SEQ ID |
| | GmAfUmGfAmAfGmGmCmsAmsAm | NO: 782 | GAAGGCAA | NO: 144 |
| ETXS1052 | CmsAfsUmGmGmUfGmGmCmAmUmUm | SEQ ID | CAUGGUGGCAUUUCC | SEQ ID |
| | UmCfCmUfUmGfGmUmAmsGmsGm | NO: 783 | UUGGUAGG | NO: 145 |
| ETXS1053 | UmsCfsGmUmGmCfCmUmCmAmUmGm | SEQ ID | UCGUGCCUCAUGGAG | SEQ ID |
| | GmAfGmAfUmCfUmUmUmsCmsGm | NO: 784 | AUCUUUCG | NO: 148 |
| ETXS1054 | AmsAfsAmUmUmCfUmUmGmUmCmAm | SEQ ID | AAAUUCUUGUCAAAG | SEQ ID |
| | AmAfGmGfUmGfGmAmGmsGmsCm | NO: 785 | GUGGAGGC | NO: 165 |
| ETXS1055 | UmsGfsUmGmGmAfUmGmAmAmGmGm | SEQ ID | UGUGGAUGAAGGCAA | SEQ ID |
| | CmAfAmAfAmCfUmCmCmsCmsCm | NO: 786 | AACUCCCC | NO: 202 |
| ETXS2128 | AmsAfsAmGmUmCfCmUfUfGmUmGm | SEQ ID | AAAGUCCUUGUGGAU | SEQ ID |
| | GmAfUmGfAmAmGmGmCmsAmsAm | NO: 795 | GAAGGCAA | NO: 787 |
| ETXS2144 | AmsAfsCmUmUmCfUmUfGfUmCmAm | SEQ ID | AACUUCUUGUCAAAG | SEQ ID |
| | AmAfGmGfUmGmGmAmGmsGmsCm | NO: 796 | GUGGAGGC | NO: 788 |
| ETXS2152 | UmsGfsUmGmGmAfUmGfAfAmGmGm | SEQ ID | UGUGGAUGAAGGCAA | SEQ ID |
| | CmAfAmAfGmCmUmAmCmsCmsCm | NO: 797 | AGCUACCC | NO: 789 |
| ETXS2398 | CmsAfsUmGmGmUfGmGmCfAmUmUm | SEQ ID | CAUGGUGGCAUUUCC | SEQ ID |
| | UmCfCmUfUmGmGmUmAmsGmsGm | NO: 801 | UUGGUAGG | NO: 145 |
| ETSX2400 | CmsAfsUmGmGmUfGmGmCmAmUmUm | SEQ ID | CAUGGUGGCAUUUCC | SEQ ID |
| | UmCfCmUfUmGfGmUmAmsGmsGm | NO: 802 | UUGGUAGG | NO: 145 |
| ETXS2402 | CmsAfsUmGmGmUoGmGmCmAmUmUm | SEQ ID | CAUGGUGGCAUUUCC | SEQ ID |
| | UmCfCmUfUmGmGmUmAmsGmsGm | NO: 803 | UUGGUAGG | NO: 145 |
| ETXS2404 | CmsAfsUmGmGmUoGmGfCfAmUmUm | SEQ ID | CAUGGUGGCAUUUCC | SEQ ID |
| | UmCfCmUfUmGmGmUmAmsGmsGm | NO: 804 | UUGGUAGG | NO: 145 |
| ETXS2406 | CmsAfsUmGmGmUfGmGmCmAmUmUm | SEQ ID | CAUGGUGGCAUUUCC | SEQ ID |
| | UmCfCmUfUmGmGmUfAmsGmsGm | NO: 805 | UUGGUAGG | NO: 145 |
| ETXS2408 | CmsAfsUmGfGmUfGmGmCmAmUmUm | SEQ ID | CAUGGUGGCAUUUCC | SEQ ID |
| | UmCfCmUfUmGmGmUmAmsGmsGm | NO: 806 | UUGGUAGG | NO: 145 |
| ETXS2410 | CmsAfsUmGfGmUfGmGfCfAmUmUm | SEQ ID | CAUGGUGGCAUUUCC | SEQ ID |
| | UmCfCmUfUmGmGmUmAmsGmsGm | NO: 807 | UUGGUAGG | NO: 145 |
| ETXS2412 | CmsAfsUmGmGmUfGmGfCfAmUmUm | SEQ ID | CAUGGUGGCAUUUCC | SEQ ID |
| | UmCfCmUfUmGfGmUmAmsGmsGm | NO: 808 | UUGGUAGG | NO: 145 |
| ETXS2414 | CmsAfsUmGmGmUfGmGfCfAmUmUm | SEQ ID | CAUGGUGGCAUUUCC | SEQ ID |
| | UmCfCmUfUmGmGmUfAmsGmsGm | NO: 809 | UUGGUAGG | NO: 145 |
| ETXS2416 | UmsCfsGmUmGmCfCmUmCfAmUmGm | SEQ ID | UCGUGCCUCAUGGAG | SEQ ID |
| | GmAfGmAfUmCmUmUmUmsCmsGm | NO: 810 | AUCUUUCG | NO: 148 |
| ETXS2418 | UmsCfsGmUmGmCfCmUmCmAmUmGm | SEQ ID | UCGUGCCUCAUGGAG | SEQ ID |
| | GmAfGmAfUmCfUmUmUmsCmsGm | NO: 811 | AUCUUUCG | NO: 148 |
| ETXS2420 | UmsCfsGmUmGmCoCmUmCmAmUmGm | SEQ ID | UCGUGCCUCAUGGAG | SEQ ID |
| | GmAfGmAfUmCmUmUmUmsCmsGm | NO: 812 | AUCUUUCG | NO: 148 |
| ETXS2422 | UmsCfsGmUmGmCoCmUfCfAmUmGm | SEQ ID | UCGUGCCUCAUGGAG | SEQ ID |
| | GmAfGmAfUmCmUmUmUmsCmsGm | NO: 813 | AUCUUUCG | NO: 148 |
| ETXS2424 | UmsCfsGmUmGmCfCmUmCmAmUmGm | SEQ ID | UCGUGCCUCAUGGAG | SEQ ID |
| | GmAfGmAfUmCmUmUfUmsCmsGm | NO: 814 | AUCUUUCG | NO: 148 |
| ETXS2426 | UmsCfsGmUfGmCfCmUmCmAmUmGm | SEQ ID | UCGUGCCUCAUGGAG | SEQ ID |
| | GmAfGmAfUmCmUmUmUmsCmsGm | NO: 815 | AUCUUUCG | NO: 148 |
| ETXS2428 | UmsCfsGmUfGmCfCmUfCfAmUmGm | SEQ ID | UCGUGCCUCAUGGAG | SEQ ID |
| | GmAfGmAfUmCmUmUmUmsCmsGm | NO: 816 | AUCUUUCG | NO: 148 |
| ETXS2430 | UmsCfsGmUmGmCfCmUfCfAmUmGm | SEQ ID | UCGUGCCUCAUGGAG | SEQ ID |
| | GmAfGmAfUmCfUm UmUmsCmsGm | NO: 817 | AUCUUUCG | NO: 148 |
| ETXS2432 | UmsCfsGmUmGmCfCmUfCfAmUmGm | SEQ ID | UCGUGCCUCAUGGAG | SEQ ID |
| | GmAfGmAfUmCmUmUfUmsCmsGm | NO: 818 | AUCUUUCG | NO: 148 |

[0889] Table 4 provides the modified second (sense) sequences. together with the corresponding unmodified second (sense) sequences for siRNA oligonucleosides according to the present invention as follows.

TABLE 4

| | | | Underlying Base | |
|---|---|---|---|---|
| | | SEQ ID | Sequence 5′ → 3′ | SEQ ID |
| Sense | Modified Second | NO | (Shown as an | NO |
| strand | (Sense) Strand | (SS- | Unmodified | (SS- |
| ID | 5′ → 3′ | mod) | Nucleoside Sequence) | unmod) |
| ETXS1035 | iaiaUmsAmsCmCmAmAmGfGmAfAfA | SEQ ID | UACCAAGGAAAUGCCAC | SEQ ID |
| | fUfGmCmCmAmCmCmAmUmGm | NO: 774 | CAUG | NO: 265 |
| ETXS1039 | iaiaAmsAmsAmGmAmUmCfUmCfCfA | SEQ ID | AAAGAUCUCCAUGAGGC | SEQ ID |
| | fUfGmAmGmGmCmAmCmGmAm | NO: 776 | ACGA | NO: 268 |
| ETXS631 | UmsGmsCmCmUmUmCfAmUfCfCfA | SEQ ID | UGCCUUCAUCCACAAGG | SEQ ID |
| | mCmAmAmGmGmAmUmUmUm | NO: 562 | AUUU | NO: 242 |
| ETXS633 | UmsGmsCmGmAmAmAfGmAfUfCfU | SEQ ID | UGCGAAAGAUCUCCAUG | SEQ ID |
| | mCmCmAmUmGmAmGmGmCm | NO: 563 | AGGC | NO: 243 |
| ETXS635 | GmsCmsUmGmGmUmGfGmUfCfCfU | SEQ ID | GCUGGUGGUCCUCAUGG | SEQ ID |
| | mCmAmUmGmGmAmGmAmAm | NO: 564 | AGAA | NO: 244 |
| ETXS637 | GmsCmsGmAmAmAmGfAmUfCfUfC | SEQ ID | GCGAAAGAUCUCCAUGA | SEQ ID |
| | mCmAmUmGmAmGmGmCmAm | NO: 565 | GGCA | NO: 245 |
| ETXS639 | GmsUmsAmUmGmAmGfAmUfGfCfA | SEQ ID | GUAUGAGAUGCAUGAGC | SEQ ID |
| | mUmGmAmGmCmUmGmCmUm | NO: 566 | UGCU | NO: 246 |
| ETXS641 | GmsUmsUmUmGmAmUfGmAfGfAfU | SEQ ID | GUUUGAUGAGAUUAAUC | SEQ ID |
| | mUmAmAmUmCmCmUmGmAm | NO: 567 | CUGA | NO: 247 |
| ETXS643 | UmsGmsAmGmAmUmUfAmAfUfCfC | SEQ ID | UGAGAUUAAUCCUGAAA | SEQ ID |
| | mUmGmAmAmAmCmCmAmAm | NO: 568 | CCAA | NO: 248 |
| ETXS645 | UmsGmsAmUmGmAmGfAmUfUfAfA | SEQ ID | UGAUGAGAUUAAUCCUG | SEQ ID |
| | mUmCmCmUmGmAmAmAmCm | NO: 569 | AAAC | NO: 249 |
| ETXS647 | AmsUmsGmAmGmAmUfUmAfAfUfC | SEQ ID | AUGAGAUUAAUCCUGAA | SEQ ID |
| | mCmUmGmAmAmAmCmCmAm | NO: 570 | ACCA | NO: 250 |
| ETXS649 | GmsAmsUmGmAmGmAfUmUfAfAfU | SEQ ID | GAUGAGAUUAAUCCUGA | SEQ ID |
| | mCmCmUmGmAmAmAmCmCm | NO: 571 | AACC | NO: 251 |
| ETXS651 | CmsUmsGmUmUmUmGfAmUfGfAfG | SEQ ID | CUGUUUGAUGAGAUUAA | SEQ ID |
| | mAmUmUmAmAmUmCmCmUm | NO: 572 | UCCU | NO: 252 |
| ETXS653 | UmsUmsUmUmGmCmCfUmUfCfAfU | SEQ ID | UUUUGCCUUCAUCCACA | SEQ ID |
| | mCmCmAmCmAmAmGmGmAm | NO: 573 | AGGA | NO: 253 |
| ETXS655 | CmsGmsAmAmAmGmAfUmCfUfCfC | SEQ ID | CGAAAGAUCUCCAUGAG | SEQ ID |
| | mAmUmGmAmGmGmCmAmCm | NO: 574 | GCAC | NO: 254 |
| ETXS657 | UmsGmsCmUmGmGmUfGmGfUfCfC | SEQ ID | UGCUGGUGGUCCUCAUG | SEQ ID |
| | mUmCmAmUmGmGmAmGmAm | NO: 575 | GAGA | NO: 255 |
| ETXS659 | CmsCmsUmUmCmAmUfCmCfAfCfA | SEQ ID | CCUUCAUCCACAAGGAU | SEQ ID |
| | mAmGmGmAmUmUmUmUmGm | NO: 576 | UUUG | NO: 256 |
| ETXS661 | GmsAmsAmAmGmAmUfCmUfCfCfA | SEQ ID | GAAAGAUCUCCAUGAGG | SEQ ID |
| | mUmGmAmGmGmCmAmCmGm | NO: 577 | CACG | NO: 257 |
| ETXS663 | UmsUmsCmAmUmCmCfAmCfAfAfG | SEQ ID | UUCAUCCACAAGGAUUU | SEQ ID |
| | mGmAmUmUmUmUmGmAmUm | NO: 578 | UGAU | NO: 258 |
| ETXS665 | UmsUmsUmGmAmUmGfAmGfAfUfU | SEQ ID | UUUGAUGAGAUUAAUCC | SEQ ID |
| | mAmAmUmCmCmUmGmAmAm | NO: 579 | UGAA | NO: 259 |
| ETXS667 | UmsUmsGmCmCmUmUfCmAfUfCfC | SEQ ID | UUGCCUUCAUCCACAAG | SEQ ID |
| | mAmCmAmAmGmGmAmUmUm | NO: 580 | GAUU | NO: 260 |
| ETXS669 | GmsAmsUmCmUmCmCfAmUfGfAfG | SEQ ID | GAUCUCCAUGAGGCACG | SEQ ID |
| | mGmCmAmCmGmAmUmGmGm | NO: 581 | AUGG | NO: 261 |
| ETXS671 | CmsAmsUmGmCmUmGfGmUfGfGfU | SEQ ID | CAUGCUGGUGGUCCUCA | SEQ ID |
| | mCmCmUmCmAmUmGmGmAm | NO: 582 | UGGA | NO: 262 |
| ETXS673 | UmsUmsUmGmCmCmUfUmCfAfUfC | SEQ ID | UUUGCCUUCAUCCACAA | SEQ ID |
| | mCmAmCmAmAmGmGmAmUm | NO: 583 | GGAU | NO: 263 |
| ETXS675 | GmsCmsCmUmUmCmAfUmCfCfAfC | SEQ ID | GCCUUCAUCCACAAGGA | SEQ ID |
| | mAmAmGmGmAmUmUmUmUm | NO: 584 | UUUU | NO: 264 |
| ETXS677 | UmsAmsCmCmAmAmGfGmAfAfAfU | SEQ ID | UACCAAGGAAAUGCCAC | SEQ ID |
| | mGmCmCmAmCmCmAmUmGm | NO: 585 | CAUG | NO: 265 |
| ETXS679 | UmsUmsGmAmUmGmAfGmAfUfUfA | SEQ ID | UUGAUGAGAUUAAUCCU | SEQ ID |
| | mAmUmCmCmUmGmAmAmAm | NO: 586 | GAAA | NO: 266 |
| ETXS681 | CmsUmsUmCmAmUmCfCmAfCfAfA | SEQ ID | CUUCAUCCACAAGGAUU | SEQ ID |
| | mGmGmAmUmUmUmUmGmAm | NO: 587 | UUGA | NO: 267 |
| ETXS683 | AmsAmsAmGmAmUmCfUmCfCfAfU | SEQ ID | AAAGAUCUCCAUGAGGC | SEQ ID |
| | mGmAmGmGmCmAmCmGmAm | NO: 588 | ACGA | NO: 268 |
| ETXS685 | UmsGmsUmUmUmGmAfUmGfAfGfA | SEQ ID | UGUUUGAUGAGAUUAAU | SEQ ID |
| | mUmUmAmAmUmCmCmUmGm | NO: 589 | CCUG | NO: 269 |
| ETXS687 | AmsUmsGmCmUmGmGfUmGfGfUfC | SEQ ID | AUGCUGGUGGUCCUCAU | SEQ ID |
| | mCmUmCmAmUmGmGmAmGm | NO: 590 | GGAG | NO: 270 |
| ETXS689 | GmsUmsUmUmUmGmCfCmUfUfCfA | SEQ ID | GUUUUGCCUUCAUCCAC | SEQ ID |
| | mUmCmCmAmCmAmAmGmGm | NO: 591 | AAGG | NO: 271 |
| ETXS691 | CmsCmsAmCmCmAmUfGmCfUfGfG | SEQ ID | CCACCAUGCUGGUGGUC | SEQ ID |
| | mUmGmGmUmCmCmUmCmAm | NO: 592 | CUCA | NO: 272 |
| ETXS693 | CmsAmsCmCmAmUmGfCmUfGfGfU | SEQ ID | CACCAUGCUGGUGGUCC | SEQ ID |
| | mGmGmUmCmCmUmCmAmUm | NO: 593 | UCAU | NO: 273 |
| ETXS695 | AmsAmsGmAmUmCmUfCmCfAfUfG | SEQ ID | AAGAUCUCCAUGAGGCA | SEQ ID |
| | mAmGmGmCmAmCmGmAmUm | NO: 594 | CGAU | NO: 274 |
| ETXS697 | AmsGmsUmUmUmUmGfCmCfUfUfC | SEQ ID | AGUUUUGCCUUCAUCCA | SEQ ID |
| | mAmUmCmCmAmCmAmAmGm | NO: 595 | CAAG | NO: 275 |
| ETXS699 | AmsCmsCmAmUmGmCfUmGfGfUfG | SEQ ID | ACCAUGCUGGUGGUCCU | SEQ ID |
| | mGmUmCmCmUmCmAmUmGm | NO: 596 | CAUG | NO: 276 |
| ETXS701 | AmsGmsAmUmCmUmCfCmAfUfGfA | SEQ ID | AGAUCUCCAUGAGGCAC | SEQ ID |
| | mGmGmCmAmCmGmAmUmGm | NO: 597 | GAUG | NO: 277 |
| ETXS703 | CmsCmsAmUmGmCmUfGmGfUfGfG | SEQ ID | CCAUGCUGGUGGUCCUC | SEQ ID |
| | mUmCmCmUmCmAmUmGmGm | NO: 598 | AUGG | NO: 278 |
| ETXS705 | UmsGmsCmCmUmCmCfAmCfCfUfU | SEQ ID | UGCCUCCACCUUUGACA | SEQ ID |
| | mUmGmAmCmAmAmGmAmAm | NO: 599 | AGAA | NO: 279 |
| ETXS707 | CmsCmsUmCmCmAmCfCmUfUfUfG | SEQ ID | CCUCCACCUUUGACAAG | SEQ ID |
| | mAmCmAmAmGmAmAmUmUm | NO: 600 | AAUU | NO: 280 |
| ETXS709 | CmsAmsUmUmAmAmGfGmUfGfCfC | SEQ ID | CAUUAAGGUGCCCAUGA | SEQ ID |
| | mCmAmUmGmAmUmGmUmAm | NO: 601 | UGUA | NO: 281 |
| ETXS711 | CmsUmsGmCmCmCmUfAmCfCfAfA | SEQ ID | CUGCCCUACCAAGGAAA | SEQ ID |
| | mGmGmAmAmAmUmGmCmCm | NO: 602 | UGCC | NO: 282 |
| ETXS713 | CmsAmsAmAmCmUmGfCmCfCfUfA | SEQ ID | CAAACUGCCCUACCAAG | SEQ ID |
| | mCmCmAmAmGmGmAmAmAm | NO: 603 | GAAA | NO: 283 |
| ETXS715 | UmsCmsAmAmAmCmUfGmCfCfCfU | SEQ ID | UCAAACUGCCCUACCAA | SEQ ID |
| | mAmCmCmAmAmGmGmAmAm | NO: 604 | GGAA | NO: 284 |
| ETXS717 | CmsUmsCmCmAmCmCfUmUfUfGfA | SEQ ID | CUCCACCUUUGACAAGA | SEQ ID |
| | mCmAmAmGmAmAmUmUmUm | NO: 605 | AUUU | NO: 285 |
| ETXS719 | CmsGmsAmCmAmCmUfUmUfCfCfA | SEQ ID | CGACACUUUCCACCUGG | SEQ ID |
| | mCmCmUmGmGmAmCmAmAm | NO: 606 | ACAA | NO: 286 |
| ETXS721 | AmsCmsUmUmUmCmCfAmCfCfUfG | SEQ ID | ACUUUCCACCUGGACAA | SEQ ID |
| | mGmAmCmAmAmGmUmAmCm | NO: 607 | GUAC | NO: 287 |
| ETXS723 | AmsAmsAmCmUmGmCfCmCfUfAfC | SEQ ID | AAACUGCCCUACCAAGG | SEQ ID |
| | mCmAmAmGmGmAmAmAmUm | NO: 608 | AAAU | NO: 288 |
| ETXS725 | AmsCmsUmGmCmCmCfUmAfCfCfA | SEQ ID | ACUGCCCUACCAAGGAA | SEQ ID |
| | mAmGmGmAmAmAmUmGmCm | NO: 609 | AUGC | NO: 289 |
| ETXS727 | CmsAmsCmUmUmUmCfCmAfCfCfU | SEQ ID | CACUUUCCACCUGGACA | SEQ ID |
| | mGmGmAmCmAmAmGmUmAm | NO: 610 | AGUA | NO: 290 |
| ETXS729 | CmsCmsAmUmUmAmAfGmGfUfGfC | SEQ ID | CCAUUAAGGUGCCCAUG | SEQ ID |
| | mCmCmAmUmGmAmUmGmUm | NO: 611 | AUGU | NO: 291 |
| ETXS731 | UmsUmsGmCmCmUmCfCmAfCfCfU | SEQ ID | UUGCCUCCACCUUUGAC | SEQ ID |
| | mUmUmGmAmCmAmAmGmAm | NO: 612 | AAGA | NO: 292 |
| ETXS733 | UmsUmsUmCmCmAmCfCmUfGfGfA | SEQ ID | UUUCCACCUGGACAAGU | SEQ ID |
| | mCmAmAmGmUmAmCmAmAm | NO: 613 | ACAA | NO: 293 |
| ETXS735 | UmsCmsCmUmCmAmAfAmCfUfGfC | SEQ ID | UCCUCAAACUGCCCUAC | SEQ ID |
| | mCmCmUmAmCmCmAmAmGm | NO: 614 | CAAG | NO: 294 |
| ETXS737 | AmsAmsCmUmGmCmCfCmUfAfCfC | SEQ ID | AACUGCCCUACCAAGGA | SEQ ID |
| | mAmAmGmGmAmAmAmUmGm | NO: 615 | AAUG | NO: 295 |
| ETXS739 | CmsCmsUmCmAmAmAfCmUfGfCfC | SEQ ID | CCUCAAACUGCCCUACC | SEQ ID |
| | mCmUmAmCmCmAmAmGmGm | NO: 616 | AAGG | NO: 296 |
| ETXS741 | GmsUmsCmCmUmCmAfAmAfCfUfG | SEQ ID | GUCCUCAAACUGCCCUA | SEQ ID |
| | mCmCmCmUmAmCmCmAmAm | NO: 617 | CCAA | NO: 297 |
| ETXS743 | GmsAmsCmAmCmUmUfUmCfCfAfC | SEQ ID | GACACUUUCCACCUGGA | SEQ ID |
| | mCmUmGmGmAmCmAmAmGm | NO: 618 | CAAG | NO: 298 |
| ETXS745 | UmsUmsUmGmCmCmUfCmCfAfCfC | SEQ ID | UUUGCCUCCACCUUUGA | SEQ ID |
| | mUmUmUmGmAmCmAmAmGm | NO: 619 | CAAG | NO: 299 |
| ETXS747 | AmsCmsAmCmUmUmUfCmCfAfCfC | SEQ ID | ACACUUUCCACCUGGAC | SEQ ID |
| | mUmGmGmAmCmAmAmGmUm | NO: 620 | AAGU | NO: 300 |
| ETXS749 | UmsUmsCmCmAmCmCfUmGfGfAfC | SEQ ID | UUCCACCUGGACAAGUA | SEQ ID |
| | mAmAmGmUmAmCmAmAmGm | NO: 621 | CAAG | NO: 301 |
| ETXS751 | CmsUmsUmUmCmCmAfCmCfUfGfG | SEQ ID | CUUUCCACCUGGACAAG | SEQ ID |
| | mAmCmAmAmGmUmAmCmAm | NO: 622 | UACA | NO: 302 |
| ETXS753 | CmsUmsCmAmAmAmCfUmGfCfCfC | SEQ ID | CUCAAACUGCCCUACCA | SEQ ID |
| | mUmAmCmCmAmAmGmGmAm | NO: 623 | AGGA | NO: 303 |
| ETXS755 | UmsUmsAmCmAmUmCfUmUfGfUfU | SEQ ID | UUACAUCUUGUUCAAAG | SEQ ID |
| | mCmAmAmAmGmGmGmAmAm | NO: 624 | GGAA | NO: 304 |
| ETXS757 | UmsGmsCmCmAmCmCfAmUfGfCfU | SEQ ID | UGCCACCAUGCUGGUGG | SEQ ID |
| | mGmGmUmGmGmUmCmCmUm | NO: 625 | UCCU | NO: 305 |
| ETXS759 | UmsAmsUmCmCmAmAfGmAfGfGfU | SEQ ID | UAUCCAAGAGGUAUUUU | SEQ ID |
| | mAmUmUmUmUmGmAmUmAm | NO: 626 | GAUA | NO: 306 |
| ETXS761 | AmsAmsAmUmGmCmCfAmCfCfAfU | SEQ ID | AAAUGCCACCAUGCUGG | SEQ ID |
| | mGmCmUmGmGmUmGmGmUm | NO: 627 | UGGU | NO: 307 |
| ETXS763 | AmsUmsUmAmCmAmUfCmUfUfGfU | SEQ ID | AUUACAUCUUGUUCAAA | SEQ ID |
| | mUmCmAmAmAmGmGmGmAm | NO: 628 | GGGA | NO: 308 |
| ETXS765 | CmsUmsCmCmAmUmGfAmGfGfCfA | SEQ ID | CUCCAUGAGGCACGAUG | SEQ ID |
| | mCmGmAmUmGmGmCmAmAm | NO: 629 | GCAA | NO: 309 |
| ETXS767 | UmsCmsCmAmUmGmCfCmUfCfCfU | SEQ ID | UCCAUGCCUCCUGUCAU | SEQ ID |
| | mGmUmCmAmUmCmAmAmAm | NO: 630 | CAAA | NO: 310 |
| ETXS769 | AmsUmsUmCmCmAmUfGmCfCfUfC | SEQ ID | AUUCCAUGCCUCCUGUC | SEQ ID |
| | mCmUmGmUmCmAmUmCmAm | NO: 631 | AUCA | NO: 311 |
| ETXS771 | CmsAmsAmGmGmAmAfAmUfGfCfC | SEQ ID | CAAGGAAAUGCCACCAU | SEQ ID |
| | mAmCmCmAmUmGmCmUmGm | NO: 632 | GCUG | NO: 312 |
| ETXS773 | UmsGmsGmUmGmGmUfCmCfUfCfA | SEQ ID | UGGUGGUCCUCAUGGAG | SEQ ID |
| | mUmGmGmAmGmAmAmAmAm | NO: 633 | AAAA | NO: 313 |
| ETXS775 | AmsUmsCmUmUmGmUfUmCfAfAfA | SEQ ID | AUCUUGUUCAAAGGGAA | SEQ ID |
| | mGmGmGmAmAmAmUmGmGm | NO: 634 | AUGG | NO: 314 |
| ETXS777 | AmsAmsGmGmAmAmAfUmGfCfCfA | SEQ ID | AAGGAAAUGCCACCAUG | SEQ ID |
| | mCmCmAmUmGmCmUmGmGm | NO: 635 | CUGG | NO: 315 |
| ETXS779 | GmsCmsCmUmCmCmAfCmCfUfUfU | SEQ ID | GCCUCCACCUUUGACAA | SEQ ID |
| | mGmAmCmAmAmGmAmAmUm | NO: 636 | GAAU | NO: 316 |
| ETXS781 | GmsAmsGmUmUmUmUfGmCfCfUfU | SEQ ID | GAGUUUUGCCUUCAUCC | SEQ ID |
| | mCmAmUmCmCmAmCmAmAm | NO: 637 | ACAA | NO: 317 |
| ETXS783 | GmsCmsUmGmCmGmAfAmAfGfAfU | SEQ ID | GCUGCGAAAGAUCUCCA | SEQ ID |
| | mCmUmCmCmAmUmGmAmGm | NO: 638 | UGAG | NO: 318 |
| ETXS785 | AmsGmsUmUmUmGmCfCmUfCfCfA | SEQ ID | AGUUUGCCUCCACCUUU | SEQ ID |
| | mCmCmUmUmUmGmAmCmAm | NO: 639 | GACA | NO: 319 |
| ETXS787 | GmsUmsUmUmGmCmCfUmCfCfAfC | SEQ ID | GUUUGCCUCCACCUUUG | SEQ ID |
| | mCmUmUmUmGmAmCmAmAm | NO: 640 | ACAA | NO: 320 |
| ETXS789 | CmsAmsUmCmUmUmGfUmUfCfAfA | SEQ ID | CAUCUUGUUCAAAGGGA | SEQ ID |
| | mAmGmGmGmAmAmAmUmGm | NO: 641 | AAUG | NO: 321 |
| ETXS791 | GmsGmsAmGmUmUmUfUmGfCfCfU | SEQ ID | GGAGUUUUGCCUUCAUC | SEQ ID |
| | mUmCmAmUmCmCmAmCmAm | NO: 642 | CACA | NO: 322 |
| ETXS793 | CmsUmsGmCmGmAmAfAmGfAfUfC | SEQ ID | CUGCGAAAGAUCUCCAU | SEQ ID |
| | mUmCmCmAmUmGmAmGmGm | NO: 643 | GAGG | NO: 323 |
| ETXS795 | CmsCmsAmUmGmCmCfUmCfCfUfG | SEQ ID | CCAUGCCUCCUGUCAUC | SEQ ID |
| | mUmCmAmUmCmAmAmAmGm | NO: 644 | AAAG | NO: 324 |
| ETXS797 | UmsGmsUmUmUmCmUfGmGfGfCfA | SEQ ID | UGUUUCUGGGCAGGGUG | SEQ ID |
| | mGmGmGmUmGmGmUmGmAm | NO: 645 | GUGA | NO: 325 |
| ETXS799 | GmsCmsCmUmGmCmUfGmCfGfAfA | SEQ ID | GCCUGCUGCGAAAGAUC | SEQ ID |
| | mAmGmAmUmCmUmCmCmAm | NO: 646 | UCCA | NO: 326 |
| ETXS801 | AmsAmsCmUmGmUmUfUmGfAfUfG | SEQ ID | AACUGUUUGAUGAGAUU | SEQ ID |
| | mAmGmAmUmUmAmAmUmCm | NO: 647 | AAUC | NO: 327 |
| ETXS803 | AmsUmsGmCmCmUmCfCmUfGfUfC | SEQ ID | AUGCCUCCUGUCAUCAA | SEQ ID |
| | mAmUmCmAmAmAmGmUmGm | NO: 648 | AGUG | NO: 328 |
| ETXS805 | AmsGmsUmAmUmGmAfGmAfUfGfC | SEQ ID | AGUAUGAGAUGCAUGAG | SEQ ID |
| | mAmUmGmAmGmCmUmGmCm | NO: 649 | CUGC | NO: 329 |
| ETXS807 | AmsAmsGmUmAmUmGfAmGfAfUfG | SEQ ID | AAGUAUGAGAUGCAUGA | SEQ ID |
| | mCmAmUmGmAmGmCmUmGm | NO: 650 | GCUG | NO: 330 |
| ETXS809 | UmsGmsUmCmCmUmCfAmAfAfCfU | SEQ ID | UGUCCUCAAACUGCCCU | SEQ ID |
| | mGmCmCmCmUmAmCmCmAm | NO: 651 | ACCA | NO: 331 |
| ETXS811 | AmsCmsUmGmUmUmUfGmAfUfGfA | SEQ ID | ACUGUUUGAUGAGAUUA | SEQ ID |
| | mGmAmUmUmAmAmUmCmCm | NO: 652 | AUCC | NO: 332 |
| ETXS813 | GmsAmsCmCmAmUmUfAmAfGfGfU | SEQ ID | GACCAUUAAGGUGCCCA | SEQ ID |
| | mGmCmCmCmAmUmGmAmUm | NO: 653 | UGAU | NO: 333 |
| ETXS815 | AmsCmsCmAmUmUmAfAmGfGfUfG | SEQ ID | ACCAUUAAGGUGCCCAU | SEQ ID |
| | mCmCmCmAmUmGmAmUmGm | NO: 654 | GAUG | NO: 334 |
| ETXS817 | GmsUmsUmUmCmUmGfGmGfCfAfG | SEQ ID | GUUUCUGGGCAGGGUGG | SEQ ID |
| | mGmGmUmGmGmUmGmAmAm | NO: 655 | UGAA | NO: 335 |
| ETXS819 | UmsUmsCmUmGmUmUfUmCfUfGfG | SEQ ID | UUCUGUUUCUGGGCAGG | SEQ ID |
| | mGmCmAmGmGmGmUmGmGm | NO: 656 | GUGG | NO: 336 |
| ETXS821 | UmsUmsUmUmCmUmUfUmCfCfGfA | SEQ ID | UUUUCUUUCCGAAGUUC | SEQ ID |
| | mAmGmUmUmCmAmAmGmCm | NO: 657 | AAGC | NO: 337 |
| ETXS823 | UmsUmsUmCmUmUmUfCmCfGfAfA | SEQ ID | UUUCUUUCCGAAGUUCA | SEQ ID |
| | mGmUmUmCmAmAmGmCmUm | NO: 658 | AGCU | NO: 338 |
| ETXS825 | UmsCmsUmGmUmUmUfCmUfGfGfG | SEQ ID | UCUGUUUCUGGGCAGGG | SEQ ID |
| | mCmAmGmGmGmUmGmGmUm | NO: 659 | UGGU | NO: 339 |
| ETXS827 | AmsUmsGmUmCmCmUfCmAfAfAfC | SEQ ID | AUGUCCUCAAACUGCCC | SEQ ID |
| | mUmGmCmCmCmUmAmCmCm | NO: 660 | UACC | NO: 340 |
| ETXS829 | UmsCmsGmAmCmAmCfUmUfUfCfC | SEQ ID | UCGACACUUUCCACCUG | SEQ ID |
| | mAmCmCmUmGmGmAmCmAm | NO: 661 | GACA | NO: 341 |
| ETXS831 | CfsCmsUfUmCfAmUfCmCfAmCfAmA | SEQ ID | CCUUCAUCCACAAGGAU | SEQ ID |
| | fGmGfAmUfUmUf | NO: 662 | UU | NO: 342 |
| ETXS833 | CfsGmsAfAmAfGmAfUmCfUmCfCmA | SEQ ID | CGAAAGAUCUCCAUGAG | SEQ ID |
| | fUmGfAmGfGmCf | NO: 663 | GC | NO: 343 |
| ETXS835 | UfsGmsGfUmGfGmUfCmCfUmCfAm | SEQ ID | UGGUGGUCCUCAUGGAG | SEQ ID |
| | UfGmGfAmGfAmAf | NO: 664 | AA | NO: 344 |
| ETXS837 | GfsAmsAfAmGfAmUfCmUfCmCfAm | SEQ ID | GAAAGAUCUCCAUGAGG | SEQ ID |
| | UfGmAfGmGfCmAf | NO: 665 | CA | NO: 345 |
| ETXS839 | AfsUmsGfAmGfAmUfGmCfAmUfGm | SEQ ID | AUGAGAUGCAUGAGCUG | SEQ ID |
| | AfGmCfUmGfCmUf | NO: 666 | CU | NO: 346 |
| ETXS841 | UfsUmsGfAmUfGmAfGmAfUmUfAm | SEQ ID | UUGAUGAGAUUAAUCCU | SEQ ID |
| | AfUmCfCmUfGmAf | NO: 667 | GA | NO: 347 |
| ETXS843 | AfsGmsAfUmUfAmAfUmCfCmUfGm | SEQ ID | AGAUUAAUCCUGAAACC | SEQ ID |
| | AfAmAfCmCfAmAf | NO: 668 | AA | NO: 348 |
| ETXS845 | AfsUmsGfAmGfAmUfUmAfAmUfCm | SEQ ID | AUGAGAUUAAUCCUGAA | SEQ ID |
| | CfUmGfAmAfAmCf | NO: 669 | AC | NO: 349 |
| ETXS847 | GfsAmsGfAmUfUmAfAmUfCmCfUm | SEQ ID | GAGAUUAAUCCUGAAAC | SEQ ID |
| | GfAmAfAmCfCmAf | NO: 670 | CA | NO: 350 |
| ETXS849 | UfsGmsAfGmAfUmUfAmAfUmCfCm | SEQ ID | UGAGAUUAAUCCUGAAA | SEQ ID |
| | UfGmAfAmAfCmCf | NO: 671 | CC | NO: 351 |
| ETXS851 | GfsUmsUfUmGfAmUfGmAfGmAfUm | SEQ ID | GUUUGAUGAGAUUAAUC | SEQ ID |
| | UfAmAfUmCfCmUf | NO: 672 | CU | NO: 352 |
| ETXS853 | UfsUmsGfCmCfUmUfCmAfUmCfCmA | SEQ ID | UUGCCUUCAUCCACAAG | SEQ ID |
| | fCmAfAmGfGmAf | NO: 673 | GA | NO: 353 |
| ETXS855 | AfsAmsAfGmAfUmCfUmCfCmAfUm | SEQ ID | AAAGAUCUCCAUGAGGC | SEQ ID |
| | GfAmGfGmCfAmCf | NO: 674 | AC | NO: 354 |
| ETXS857 | CfsUmsGfGmUfGmGfUmCfCmUfCmA | SEQ ID | CUGGUGGUCCUCAUGGA | SEQ ID |
| | fUmGfGmAfGmAf | NO: 675 | GA | NO: 355 |
| ETXS859 | UfsUmsCfAmUfCmCfAmCfAmAfGmG | SEQ ID | UUCAUCCACAAGGAUUU | SEQ ID |
| | fAmUfUmUfUmGf | NO: 676 | UG | NO: 356 |
| ETXS861 | AfsAmsGfAmUfCmUfCmCfAmUfGm | SEQ ID | AAGAUCUCCAUGAGGCA | SEQ ID |
| | AfGmGfCmAfCmGf | NO: 677 | CG | NO: 357 |
| ETXS863 | CfsAmsUfCmCfAmCfAmAfGmGfAmU | SEQ ID | CAUCCACAAGGAUUUUG | SEQ ID |
| | fUmUfUmGfAmUf | NO: 678 | AU | NO: 358 |
| ETXS865 | UfsGmsAfUmGfAmGfAmUfUmAfAm | SEQ ID | UGAUGAGAUUAAUCCUG | SEQ ID |
| | UfCmCfUmGfAmAf | NO: 679 | AA | NO: 359 |
| ETXS867 | GfsCmsCfUmUfCmAfUmCfCmAfCmA | SEQ ID | GCCUUCAUCCACAAGGA | SEQ ID |
| | fAmGfGmAfUmUf | NO: 680 | UU | NO: 360 |
| ETXS869 | UfsCmsUfCmCfAmUfGmAfGmGfCmA | SEQ ID | UCUCCAUGAGGCACGAU | SEQ ID |
| | fCmGfAmUfGmGf | NO: 681 | GG | NO: 361 |
| ETXS871 | UmsGmsCmCmUmUmCfAfUfCfCfAm | SEQ ID | UGCCUUCAUCCACAAGG | SEQ ID |
| | CmAmAmGmGmAmUfUmUm | NO: 682 | AUUU | NO: 242 |
| ETXS873 | UmsGmsCmGmAmAmAfGfAfUfCfUm | SEQ ID | UGCGAAAGAUCUCCAUG | SEQ ID |
| | CmCmAmUmGmAmGfGmCm | NO: 683 | AGGC | NO: 243 |
| ETXS875 | GmsCmsUmGmGmUmGfGfUfCfCfUm | SEQ ID | GCUGGUGGUCCUCAUGG | SEQ ID |
| | CmAmUmGmGmAmGfAmAm | NO: 684 | AGAA | NO: 244 |
| ETXS877 | GmsCmsGmAmAmAmGfAfUfCfUfCm | SEQ ID | GCGAAAGAUCUCCAUGA | SEQ ID |
| | CmAmUmGmAmGmGfCmAm | NO: 685 | GGCA | NO: 245 |
| ETXS879 | GmsUmsAmUmGmAmGfAfUfGfCfAm | SEQ ID | GUAUGAGAUGCAUGAGC | SEQ ID |
| | UmGmAmGmCmUmGfCmUm | NO: 686 | UGCU | NO: 246 |
| ETXS881 | GmsUmsUmUmGmAmUfGfAfGfAfUm | SEQ ID | GUUUGAUGAGAUUAAUC | SEQ ID |
| | UmAmAmUmCmCmUfGmAm | NO: 687 | CUGA | NO: 247 |
| ETXS883 | UmsGmsAmGmAmUmUfAfAfUfCfCm | SEQ ID | UGAGAUUAAUCCUGAAA | SEQ ID |
| | UmGmAmAmAmCmCfAmAm | NO: 688 | CCAA | NO: 248 |
| ETXS885 | UmsGmsAmUmGmAmGfAfUfUfAfAm | SEQ ID | UGAUGAGAUUAAUCCUG | SEQ ID |
| | UmCmCmUmGmAmAfAmCm | NO: 689 | AAAC | NO: 249 |
| ETXS887 | AmsUmsGmAmGmAmUfUfAfAfUfCm | SEQ ID | AUGAGAUUAAUCCUGAA | SEQ ID |
| | CmUmGmAmAmAmCfCmAm | NO: 690 | ACCA | NO: 250 |
| ETXS889 | GmsAmsUmGmAmGmAfUfUfAfAfUm | SEQ ID | GAUGAGAUUAAUCCUGA | SEQ ID |
| | CmCmUmGmAmAmAfCmCm | NO: 691 | AACC | NO: 251 |
| ETXS891 | CmsUmsGmUmUmUmGfAfUfGfAfGm | SEQ ID | CUGUUUGAUGAGAUUAA | SEQ ID |
| | AmUmUmAmAmUmCfCmUm | NO: 692 | UCCU | NO: 252 |
| ETXS893 | UmsUmsUmUmGmCmCfUfUfCfAfUm | SEQ ID | UUUUGCCUUCAUCCACA | SEQ ID |
| | CmCmAmCmAmAmGfGmAm | NO: 693 | AGGA | NO: 253 |
| ETXS895 | CmsGmsAmAmAmGmAfUfCfUfCfCm | SEQ ID | CGAAAGAUCUCCAUGAG | SEQ ID |
| | AmUmGmAmGmGmCfAmCm | NO: 694 | GCAC | NO: 254 |
| ETXS897 | UmsGmsCmUmGmGmUfGfGfUfCfCm | SEQ ID | UGCUGGUGGUCCUCAUG | SEQ ID |
| | UmCmAmUmGmGmAfGmAm | NO: 695 | GAGA | NO: 255 |
| ETXS899 | CmsCmsUmUmCmAmUfCfCfAfCfAm | SEQ ID | CCUUCAUCCACAAGGAU | SEQ ID |
| | AmGmGmAmUmUmUfUmGm | NO: 696 | UUUG | NO: 256 |
| ETXS901 | GmsAmsAmAmGmAmUfCfUfCfCfAm | SEQ ID | GAAAGAUCUCCAUGAGG | SEQ ID |
| | UmGmAmGmGmCmAfCmGm | NO: 697 | CACG | NO: 257 |
| ETXS903 | UmsUmsCmAmUmCmCfAfCfAfAfGm | SEQ ID | UUCAUCCACAAGGAUUU | SEQ ID |
| | GmAmUmUmUmUmGfAmUm | NO: 698 | UGAU | NO: 258 |
| ETXS905 | UmsUmsUmGmAmUmGfAfGfAfUfUm | SEQ ID | UUUGAUGAGAUUAAUCC | SEQ ID |
| | AmAmUmCmCmUmGfAmAm | NO: 699 | UGAA | NO: 259 |
| ETXS907 | UmsUmsGmCmCmUmUfCfAfUfCfCm | SEQ ID | UUGCCUUCAUCCACAAG | SEQ ID |
| | AmCmAmAmGmGmAfUmUm | NO: 700 | GAUU | NO: 260 |
| ETXS909 | GmsAmsUmCmUmCmCfAfUfGfAfGm | SEQ ID | GAUCUCCAUGAGGCACG | SEQ ID |
| | GmCmAmCmGmAmUfGmGm | NO: 701 | AUGG | NO: 261 |
| ETXS911 | UmsGmsCmCmUmUfCfAmUfCfCfAfC | SEQ ID | UGCCUUCAUCCACAAGG | SEQ ID |
| | mAmAmGmGmAmUmUmUm | NO: 702 | AUUU | NO: 242 |
| ETXS913 | UmsGmsCmGmAmAfAfGmAfUfCfUf | SEQ ID | UGCGAAAGAUCUCCAUG | SEQ ID |
| | CmCmAmUmGmAmGmGmCm | NO: 703 | AGGC | NO: 243 |
| ETXS915 | GmsCmsUmGmGmUfGfGmUfCfCfUfC | SEQ ID | GCUGGUGGUCCUCAUGG | SEQ ID |
| | mAmUmGmGmAmGmAmAm | NO: 704 | AGAA | NO: 244 |
| ETXS917 | GmsCmsGmAmAmAfGfAmUfCfUfCfC | SEQ ID | GCGAAAGAUCUCCAUGA | SEQ ID |
| | mAmUmGmAmGmGmCmAm | NO: 705 | GGCA | NO: 245 |
| ETXS919 | GmsUmsAmUmGmAfGfAmUfGfCfAf | SEQ ID | GUAUGAGAUGCAUGAGC | SEQ ID |
| | UmGmAmGmCmUmGmCmUm | NO: 706 | UGCU | NO: 246 |
| ETXS921 | GmsUmsUmUmGmAfUfGmAfGfAfUf | SEQ ID | GUUUGAUGAGAUUAAUC | SEQ ID |
| | UmAmAmUmCmCmUmGmAm | NO: 707 | CUGA | NO: 247 |
| ETXS923 | UmsGmsAmGmAmUfUfAmAfUfCfCf | SEQ ID | UGAGAUUAAUCCUGAAA | SEQ ID |
| | UmGmAmAmAmCmCmAmAm | NO: 708 | CCAA | NO: 248 |
| ETXS925 | UmsGmsAmUmGmAfGfAmUfUfAfAf | SEQ ID | UGAUGAGAUUAAUCCUG | SEQ ID |
| | UmCmCmUmGmAmAmAmCm | NO: 709 | AAAC | NO: 249 |
| ETXS927 | AmsUmsGmAmGmAfUfUmAfAfUfCf | SEQ ID | AUGAGAUUAAUCCUGAA | SEQ ID |
| | CmUmGmAmAmAmCmCmAm | NO: 710 | ACCA | NO: 250 |
| ETXS929 | GmsAmsUmGmAmGfAfUmUfAfAfUf | SEQ ID | GAUGAGAUUAAUCCUGA | SEQ ID |
| | CmCmUmGmAmAmAmCmCm | NO: 711 | AACC | NO: 251 |
| ETXS931 | CmsUmsGmUmUmUfGfAmUfGfAfGf | SEQ ID | CUGUUUGAUGAGAUUAA | SEQ ID |
| | AmUmUmAmAmUmCmCmUm | NO: 712 | UCCU | NO: 252 |
| ETXS933 | UmsUmsUmUmGmCfCfUmUfCfAfUfC | SEQ ID | UUUUGCCUUCAUCCACA | SEQ ID |
| | mCmAmCmAmAmGmGmAm | NO: 713 | AGGA | NO: 253 |
| ETXS935 | CmsGmsAmAmAmGfAfUmCfUfCfCfA | SEQ ID | CGAAAGAUCUCCAUGAG | SEQ ID |
| | mUmGmAmGmGmCmAmCm | NO: 714 | GCAC | NO: 254 |
| ETXS937 | UmsGmsCmUmGmGfUfGmGfUfCfCf | SEQ ID | UGCUGGUGGUCCUCAUG | SEQ ID |
| | UmCmAmUmGmGmAmGmAm | NO: 715 | GAGA | NO: 255 |
| ETXS939 | CmsCmsUmUmCmAfUfCmCfAfCfAfA | SEQ ID | CCUUCAUCCACAAGGAU | SEQ ID |
| | mGmGmAmUmUmUmUmGm | NO: 716 | UUUG | NO: 256 |
| ETXS941 | GmsAmsAmAmGmAfUfCmUfCfCfAf | SEQ ID | GAAAGAUCUCCAUGAGG | SEQ ID |
| | UmGmAmGmGmCmAmCmGm | NO: 717 | CACG | NO: 257 |
| ETXS943 | UmsUmsCmAmUmCfCfAmCfAfAfGfG | SEQ ID | UUCAUCCACAAGGAUUU | SEQ ID |
| | mAmUmUmUmUmGmAmUm | NO: 718 | UGAU | NO: 258 |
| ETXS945 | UmsUmsUmGmAmUfGfAmGfAfUfUf | SEQ ID | UUUGAUGAGAUUAAUCC | SEQ ID |
| | AmAmUmCmCmUmGmAmAm | NO: 719 | UGAA | NO: 259 |
| ETXS947 | UmsUmsGmCmCmUfUfCmAfUfCfCfA | SEQ ID | UUGCCUUCAUCCACAAG | SEQ ID |
| | mCmAmAmGmGmAmUmUm | NO: 720 | GAUU | NO: 260 |
| ETXS949 | GmsAmsUmCmUmCfCfAmUfGfAfGf | SEQ ID | GAUCUCCAUGAGGCACG | SEQ ID |
| | GmCmAmCmGmAmUmGmGm | NO: 721 | AUGG | NO: 261 |
| ETXS951 | UmsGmsCmCmUmUmCfAmUfCfCfAf | SEQ ID | UGCCUUCAUCCACAAGG | SEQ ID |
| | CmAmAmGmGmAmUmUmUm | NO: 722 | AUUU | NO: 242 |
| ETXS953 | UmsGmsCmGmAmAmAfGmAfUfCfUf | SEQ ID | UGCGAAAGAUCUCCAUG | SEQ ID |
| | CmCmAmUmGmAmGmGmCm | NO: 723 | AGGC | NO: 243 |
| ETXS955 | GmsCmsUmGmGmUmGfGmUfCfCfUf | SEQ ID | GCUGGUGGUCCUCAUGG | SEQ ID |
| | CmAmUmGmGmAmGmAmAm | NO: 724 | AGAA | NO: 244 |
| ETXS957 | GmsCmsGmAmAmAmGfAmUfCfUfCf | SEQ ID | GCGAAAGAUCUCCAUGA | SEQ ID |
| | CmAmUmGmAmGmGmCmAm | NO: 725 | GGCA | NO: 245 |
| ETXS959 | GmsUmsAmUmGmAmGfAmUfGfCfAf | SEQ ID | GUAUGAGAUGCAUGAGC | SEQ ID |
| | UmGmAmGmCmUmGmCmUm | NO: 726 | UGCU | NO: 246 |
| ETXS961 | GmsUmsUmUmGmAmUfGmAfGfAfUf | SEQ ID | GUUUGAUGAGAUUAAUC | SEQ ID |
| | UmAmAmUmCmCmUmGmAm | NO: 727 | CUGA | NO: 247 |
| ETXS963 | UmsGmsAmGmAmUmUfAmAfUfCfCf | SEQ ID | UGAGAUUAAUCCUGAAA | SEQ ID |
| | UmGmAmAmAmCmCmAmAm | NO: 728 | CCAA | NO: 248 |
| ETXS965 | UmsGmsAmUmGmAmGfAmUfUfAfAf | SEQ ID | UGAUGAGAUUAAUCCUG | SEQ ID |
| | UmCmCmUmGmAmAmAmCm | NO: 729 | AAAC | NO: 249 |
| ETXS967 | AmsUmsGmAmGmAmUfUmAfAfUfCf | SEQ ID | AUGAGAUUAAUCCUGAA | SEQ ID |
| | CmUmGmAmAmAmCmCmAm | NO: 730 | ACCA | NO: 250 |
| ETXS969 | GmsAmsUmGmAmGmAfUmUfAfAfUf | SEQ ID | GAUGAGAUUAAUCCUGA | SEQ ID |
| | CmCmUmGmAmAmAmCmCm | NO: 731 | AACC | NO: 251 |
| ETXS971 | CmsUmsGmUmUmUmGfAmUfGfAfGf | SEQ ID | CUGUUUGAUGAGAUUAA | SEQ ID |
| | AmUmUmAmAmUmCmCmUm | NO: 732 | UCCU | NO: 252 |
| ETXS973 | UmsUmsUmUmGmCmCfUmUfCfAfUf | SEQ ID | UUUUGCCUUCAUCCACA | SEQ ID |
| | CmCmAmCmAmAmGmGmAm | NO: 733 | AGGA | NO: 253 |
| ETXS975 | CmsGmsAmAmAmGmAfUmCfUfCfCf | SEQ ID | CGAAAGAUCUCCAUGAG | SEQ ID |
| | AmUmGmAmGmGmCmAmCm | NO: 734 | GCAC | NO: 254 |
| ETXS977 | UmsGmsCmUmGmGmUfGmGfUfCfCf | SEQ ID | UGCUGGUGGUCCUCAUG | SEQ ID |
| | UmCmAmUmGmGmAmGmAm | NO: 735 | GAGA | NO: 255 |
| ETXS979 | CmsCmsUmUmCmAmUfCmCfAfCfAf | SEQ ID | CCUUCAUCCACAAGGAU | SEQ ID |
| | AmGmGmAmUmUmUmUmGm | NO: 736 | UUUG | NO: 256 |
| ETXS981 | GmsAmsAmAmGmAmUfCmUfCfCfAf | SEQ ID | GAAAGAUCUCCAUGAGG | SEQ ID |
| | UmGmAmGmGmCmAmCmGm | NO: 737 | CACG | NO: 257 |
| ETXS983 | UmsUmsCmAmUmCmCfAmCfAfAfGf | SEQ ID | UUCAUCCACAAGGAUUU | SEQ ID |
| | GmAmUmUmUmUmGmAmUm | NO: 738 | UGAU | NO: 258 |
| ETXS985 | UmsUmsUmGmAmUmGfAmGfAfUfUf | SEQ ID | UUUGAUGAGAUUAAUCC | SEQ ID |
| | AmAmUmCmCmUmGmAmAm | NO: 739 | UGAA | NO: 259 |
| ETXS987 | UmsUmsGmCmCmUmUfCmAfUfCfCf | SEQ ID | UUGCCUUCAUCCACAAG | SEQ ID |
| | AmCmAmAmGmGmAmUmUm | NO: 740 | GAUU | NO: 260 |
| ETXS989 | GmsAmsUmCmUmCmCfAmUfGfAfGf | SEQ ID | GAUCUCCAUGAGGCACG | SEQ ID |
| | GmCmAmCmGmAmUmGmGm | NO: 741 | AUGG | NO: 261 |
| ETXS991 | UmsGmsCmCmUmUmCfAmUfCfCfAf | SEQ ID | UGCCUUCAUCCACAAGG | SEQ ID |
| | CmAmAmGmGmAmUmUmUm | NO: 742 | AUUU | NO: 242 |
| ETXS993 | UmsGmsCmGmAmAmAfGmAfUfCfUf | SEQ ID | UGCGAAAGAUCUCCAUG | SEQ ID |
| | CmCmAmUmGmAmGmGmCm | NO: 743 | AGGC | NO: 243 |
| ETXS995 | GmsCmsUmGmGmUmGfGmUfCfCfUf | SEQ ID | GCUGGUGGUCCUCAUGG | SEQ ID |
| | CmAmUmGmGmAmGmAmAm | NO: 744 | AGAA | NO: 244 |
| ETXS997 | GmsCmsGmAmAmAmGfAmUfCfUfCf | SEQ ID | GCGAAAGAUCUCCAUGA | SEQ ID |
| | CmAmUmGmAmGmGmCmAm | NO: 745 | GGCA | NO: 245 |
| ETXS999 | GmsUmsAmUmGmAmGfAmUfGfCfAf | SEQ ID | GUAUGAGAUGCAUGAGC | SEQ ID |
| | UmGmAmGmCmUmGmCmUm | NO: 746 | UGCU | NO: 246 |
| ETXS1001 | GmsUmsUmUmGmAmUfGmAfGfAfUf | SEQ ID | GUUUGAUGAGAUUAAUC | SEQ ID |
| | UmAmAmUmCmCmUmGmAm | NO: 747 | CUGA | NO: 247 |
| ETXS1003 | UmsGmsAmGmAmUmUfAmAfUfCfCf | SEQ ID | UGAGAUUAAUCCUGAAA | SEQ ID |
| | UmGmAmAmAmCmCmAmAm | NO: 748 | CCAA | NO: 248 |
| ETXS1005 | UmsGmsAmUmGmAmGfAmUfUfAfAf | SEQ ID | UGAUGAGAUUAAUCCUG | SEQ ID |
| | UmCmCmUmGmAmAmAmCm | NO: 749 | AAAC | NO: 249 |
| ETXS1007 | AmsUmsGmAmGmAmUfUmAfAfUfCf | SEQ ID | AUGAGAUUAAUCCUGAA | SEQ ID |
| | CmUmGmAmAmAmCmCmAm | NO: 750 | ACCA | NO: 250 |
| ETXS1009 | GmsAmsUmGmAmGmAfUmUfAfAfUf | SEQ ID | GAUGAGAUUAAUCCUGA | SEQ ID |
| | CmCmUmGmAmAmAmCmCm | NO: 751 | AACC | NO: 251 |
| ETXS1011 | CmsUmsGmUmUmUmGfAmUfGfAfGf | SEQ ID | CUGUUUGAUGAGAUUAA | SEQ ID |
| | AmUmUmAmAmUmCmCmUm | NO: 752 | UCCU | NO: 252 |
| ETXS1013 | UmsUmsUmUmGmCmCfUmUfCfAfUf | SEQ ID | UUUUGCCUUCAUCCACA | SEQ ID |
| | CmCmAmCmAmAmGmGmAm | NO: 753 | AGGA | NO: 253 |
| ETXS1015 | CmsGmsAmAmAmGmAfUmCfUfCfCf | SEQ ID | CGAAAGAUCUCCAUGAG | SEQ ID |
| | AmUmGmAmGmGmCmAmCm | NO: 754 | GCAC | NO: 254 |
| ETXS1017 | UmsGmsCmUmGmGmUfGmGfUfCfCf | SEQ ID | UGCUGGUGGUCCUCAUG | SEQ ID |
| | UmCmAmUmGmGmAmGmAm | NO: 755 | GAGA | NO: 255 |
| ETXS1019 | CmsCmsUmUmCmAmUfCmCfAfCfAf | SEQ ID | CCUUCAUCCACAAGGAU | SEQ ID |
| | AmGmGmAmUmUmUmUmGm | NO: 756 | UUUG | NO: 256 |
| ETXS1021 | GmsAmsAmAmGmAmUfCmUfCfCfAf | SEQ ID | GAAAGAUCUCCAUGAGG | SEQ ID |
| | UmGmAmGmGmCmAmCmGm | NO: 757 | CACG | NO: 257 |
| ETXS1023 | UmsUmsCmAmUmCmCfAmCfAfAfGf | SEQ ID | UUCAUCCACAAGGAUUU | SEQ ID |
| | GmAmUmUmUmUmGmAmUm | NO: 758 | UGAU | NO: 258 |
| ETXS1025 | UmsUmsUmGmAmUmGfAmGfAfUfUf | SEQ ID | UUUGAUGAGAUUAAUCC | SEQ ID |
| | AmAmUmCmCmUmGmAmAm | NO: 759 | UGAA | NO: 259 |
| ETXS1027 | UmsUmsGmCmCmUmUfCmAfUfCfCf | SEQ ID | UUGCCUUCAUCCACAAG | SEQ ID |
| | AmCmAmAmGmGmAmUmUm | NO: 760 | GAUU | NO: 260 |
| ETXS1029 | GmsAmsUmCmUmCmCfAmUfGfAfGf | SEQ ID | GAUCUCCAUGAGGCACG | SEQ ID |
| | GmCmAmCmGmAmUmGmGm | NO: 761 | AUGG | NO: 261 |
| ETXS1031 | iaiaGmsCmsCmUmUmCmAfUmCfCfA | SEQ ID | GCCUUCAUCCACAAGGA | SEQ ID |
| | fCfAmAmGmGmAmUmUmUmUm | NO: 772 | UUUU | NO: 264 |
| ETXS1033 | iaiaGmsCmsCmUmUmCmAmUmCfCf | SEQ ID | GCCUUCAUCCACAAGGA | SEQ ID |
| | AfCmAmAmGmGmAmUmUmUmUm | NO: 773 | UUUU | NO: 264 |
| ETXS1037 | iaiaUmsAmsCmCmAmAmGmGmAfAf | SEQ ID | UACCAAGGAAAUGCCAC | SEQ ID |
| | AfUmGmCmCmAmCmCmAmUmGm | NO: 775 | CAUG | NO: 265 |
| ETXS1041 | iaiaAmsAmsAmGmAmUmCmUmCfCf | SEQ ID | AAAGAUCUCCAUGAGGC | SEQ ID |
| | AfUmGmAmGmGmCmAmCmGmAm | NO: 777 | ACGA | NO: 268 |
| ETXS1043 | iaiaCmsUmsCmCmAmCmCfUmUfUfG | SEQ ID | CUCCACCUUUGACAAGA | SEQ ID |
| | fAfCmAmAmGmAmAmUmUmUm | NO: 778 | AUUU | NO: 285 |
| ETXS1045 | iaiaCmsUmsCmCmAmCmCmUmUfUf | SEQ ID | CUCCACCUUUGACAAGA | SEQ ID |
| | GfAmCmAmAmGmAmAmUmUmUm | NO: 779 | AUUU | NO: 285 |
| ETXS1047 | iaiaGmsGmsAmGmUmUmUfUmGfCfC | SEQ ID | GGAGUUUUGCCUUCAUC | SEQ ID |
| | fUfUmCmAmUmCmCmAmCmAm | NO: 780 | CACA | NO: 322 |
| ETXS1049 | iaiaGmsGmsAmGmUmUmUmUmGfCf | SEQ ID | GGAGUUUUGCCUUCAUC | SEQ ID |
| | CfUmUmCmAmUmCmCmAmCmAm | NO: 781 | CACA | NO: 322 |
| ETXS2127 | GmsCmsCmUmUmCmAfUmCfCfAfC | SEQ ID | GCCUUCAUCCACAAGGA | SEQ ID |
| | mAmAmGmGmAmCmUmUmUm | NO: 798 | CUUU | NO: 791 |
| ETXS2143 | CmsUmsCmCmAmCmCfUmUfUfGfA | SEQ ID | CUCCACCUUUGACAAGA | SEQ ID |
| | mCmAmAmGmAmAmGmUmUm | NO: 799 | AGUU | NO: 792 |
| ETXS2151 | GmsUmsAmGmCmUmUfUmGfCfCfU | SEQ ID | GUAGCUUUGCCUUCAUC | SEQ ID |
| | mUmCmAmUmCmCmAmCmAm | NO: 800 | CACA | NO: 793 |
| ETXS2397 | iaiaUmsAmsCmCmAmAmGmGmAfAf | SEQ ID | UACCAAGGAAAUGCCAC | SEQ ID |
| | AfUmGmCmCmAmCmCmAmUmGm | NO: 819 | CAUG | NO: 265 |
| ETXS2399 | iaiaAmsAmsAmGmAmUmCmUmCfCf | SEQ ID | AAAGAUCUCCAUGAGGC | SEQ ID |
| | AfUmGmAmGmGmCmAmCmGmAm | NO: 820 | ACGA | NO: 268 |

[0890] Some of the modified second strand sequences as illustrated above in Table 4 include the preferred 5′ iaia motif. However, it should also be understood that the scope of these modified second strand sequences additionally includes the Me/F modified second strand in the absence of the 5′iaia motif.

[0891] Table 5 identifies duplexes with Duplex IDs referencing the modified antisense and sense IDs from previous Tables 3 and 4.

TABLE 5

| Duplex ID | First (Antisense) strand ID | Second (Sense) strand ID |
|---|---|---|
| ETXM1184 | ETXS1036 | ETXS1035 |
| ETXM1157 | ETXS1040 | ETXS1039 |
| ETXM316 | ETXS632 | ETXS631 |
| ETXM317 | ETXS634 | ETXS633 |
| ETXM318 | ETXS636 | ETXS635 |
| ETXM319 | ETXS638 | ETXS637 |
| ETXM320 | ETXS640 | ETXS639 |
| ETXM321 | ETXS642 | ETXS641 |
| ETXM322 | ETXS644 | ETXS643 |
| ETXM323 | ETXS646 | ETXS645 |
| ETXM324 | ETXS648 | ETXS647 |
| ETXM325 | ETXS650 | ETXS649 |
| ETXM326 | ETXS652 | ETXS651 |
| ETXM327 | ETXS654 | ETXS653 |
| ETXM328 | ETXS656 | ETXS655 |
| ETXM329 | ETXS658 | ETXS657 |
| ETXM330 | ETXS660 | ETXS659 |
| ETXM331 | ETXS662 | ETXS661 |
| ETXM332 | ETXS664 | ETXS663 |
| ETXM333 | ETXS666 | ETXS665 |
| ETXM334 | ETXS668 | ETXS667 |
| ETXM335 | ETXS670 | ETXS669 |
| ETXM336 | ETXS672 | ETXS671 |
| ETXM337 | ETXS674 | ETXS673 |
| ETXM338 | ETXS676 | ETXS675 |
| ETXM339 | ETXS678 | ETXS677 |
| ETXM340 | ETXS680 | ETXS679 |
| ETXM341 | ETXS682 | ETXS681 |
| ETXM342 | ETXS684 | ETXS683 |
| ETXM343 | ETXS686 | ETXS685 |
| ETXM344 | ETXS688 | ETXS687 |
| ETXM345 | ETXS690 | ETXS689 |
| ETXM346 | ETXS692 | ETXS691 |
| ETXM347 | ETXS694 | ETXS693 |
| ETXM348 | ETXS696 | ETXS695 |
| ETXM349 | ETXS698 | ETXS697 |
| ETXM350 | ETXS700 | ETXS699 |
| ETXM351 | ETXS702 | ETXS701 |
| ETXM352 | ETXS704 | ETXS703 |
| ETXM353 | ETXS706 | ETXS705 |
| ETXM354 | ETXS708 | ETXS707 |
| ETXM355 | ETXS710 | ETXS709 |
| ETXM356 | ETXS712 | ETXS711 |
| ETXM357 | ETXS714 | ETXS713 |
| ETXM358 | ETXS716 | ETXS715 |
| ETXM359 | ETXS718 | ETXS717 |
| ETXM360 | ETXS720 | ETXS719 |
| ETXM361 | ETXS722 | ETXS721 |
| ETXM362 | ETXS724 | ETXS723 |
| ETXM363 | ETXS726 | ETXS725 |
| ETXM364 | ETXS728 | ETXS727 |
| ETXM365 | ETXS730 | ETXS729 |
| ETXM366 | ETXS732 | ETXS731 |
| ETXM367 | ETXS734 | ETXS733 |
| ETXM368 | ETXS736 | ETXS735 |
| ETXM369 | ETXS738 | ETXS737 |
| ETXM370 | ETXS740 | ETXS739 |
| ETXM371 | ETXS742 | ETXS741 |
| ETXM372 | ETXS744 | ETXS743 |
| ETXM373 | ETXS746 | ETXS745 |
| ETXM374 | ETXS748 | ETXS747 |
| ETXM375 | ETXS750 | ETXS749 |
| ETXM376 | ETXS752 | ETXS751 |
| ETXM377 | ETXS754 | ETXS753 |
| ETXM378 | ETXS756 | ETXS755 |
| ETXM379 | ETXS758 | ETXS757 |
| ETXM380 | ETXS760 | ETXS759 |
| ETXM381 | ETXS762 | ETXS761 |
| ETXM382 | ETXS764 | ETXS763 |
| ETXM383 | ETXS766 | ETXS765 |
| ETXM384 | ETXS768 | ETXS767 |
| ETXM385 | ETXS770 | ETXS769 |
| ETXM386 | ETXS772 | ETXS771 |
| ETXM387 | ETXS774 | ETXS773 |
| ETXM388 | ETXS776 | ETXS775 |
| ETXM389 | ETXS778 | ETXS777 |
| ETXM390 | ETXS780 | ETXS779 |
| ETXM391 | ETXS782 | ETXS781 |
| ETXM392 | ETXS784 | ETXS783 |
| ETXM393 | ETXS786 | ETXS785 |
| ETXM394 | ETXS788 | ETXS787 |
| ETXM395 | ETXS790 | ETXS789 |
| ETXM396 | ETXS792 | ETXS791 |
| ETXM397 | ETXS794 | ETXS793 |
| ETXM398 | ETXS796 | ETXS795 |
| ETXM399 | ETXS798 | ETXS797 |
| ETXM400 | ETXS800 | ETXS799 |
| ETXM401 | ETXS802 | ETXS801 |
| ETXM402 | ETXS804 | ETXS803 |
| ETXM403 | ETXS806 | ETXS805 |
| ETXM404 | ETXS808 | ETXS807 |
| ETXM405 | ETXS810 | ETXS809 |
| ETXM406 | ETXS812 | ETXS811 |
| ETXM407 | ETXS814 | ETXS813 |
| ETXM408 | ETXS816 | ETXS815 |
| ETXM409 | ETXS818 | ETXS817 |
| ETXM410 | ETXS820 | ETXS819 |
| ETXM411 | ETXS822 | ETXS821 |
| ETXM412 | ETXS824 | ETXS823 |
| ETXM413 | ETXS826 | ETXS825 |
| ETXM414 | ETXS828 | ETXS827 |
| ETXM415 | ETXS830 | ETXS829 |
| ETXM416 | ETXS832 | ETXS831 |
| ETXM417 | ETXS834 | ETXS833 |
| ETXM418 | ETXS836 | ETXS835 |
| ETXM419 | ETXS838 | ETXS837 |
| ETXM420 | ETXS840 | ETXS839 |
| ETXM421 | ETXS842 | ETXS841 |
| ETXM422 | ETXS844 | ETXS843 |
| ETXM423 | ETXS846 | ETXS845 |
| ETXM424 | ETXS848 | ETXS847 |
| ETXM425 | ETXS850 | ETXS849 |
| ETXM426 | ETXS852 | ETXS851 |
| ETXM427 | ETXS854 | ETXS853 |
| ETXM428 | ETXS856 | ETXS855 |
| ETXM429 | ETXS858 | ETXS857 |
| ETXM430 | ETXS860 | ETXS859 |
| ETXM431 | ETXS862 | ETXS861 |
| ETXM432 | ETXS864 | ETXS863 |
| ETXM433 | ETXS866 | ETXS865 |
| ETXM434 | ETXS868 | ETXS867 |
| ETXM435 | ETXS870 | ETXS869 |
| ETXM436 | ETXS872 | ETXS871 |
| ETXM437 | ETXS874 | ETXS873 |
| ETXM438 | ETXS876 | ETXS875 |
| ETXM439 | ETXS878 | ETXS877 |
| ETXM440 | ETXS880 | ETXS879 |
| ETXM441 | ETXS882 | ETXS881 |
| ETXM442 | ETXS884 | ETXS883 |
| ETXM443 | ETXS886 | ETXS885 |
| ETXM444 | ETXS888 | ETXS887 |
| ETXM445 | ETXS890 | ETXS889 |
| ETXM446 | ETXS892 | ETXS891 |
| ETXM447 | ETXS894 | ETXS893 |
| ETXM448 | ETXS896 | ETXS895 |
| ETXM449 | ETXS898 | ETXS897 |
| ETXM450 | ETXS900 | ETXS899 |
| ETXM451 | ETXS902 | ETXS901 |
| ETXM452 | ETXS904 | ETXS903 |
| ETXM453 | ETXS906 | ETXS905 |
| ETXM454 | ETXS908 | ETXS907 |
| ETXM455 | ETXS910 | ETXS909 |
| ETXM456 | ETXS912 | ETXS911 |
| ETXM457 | ETXS914 | ETXS913 |
| ETXM458 | ETXS916 | ETXS915 |
| ETXM459 | ETXS918 | ETXS917 |
| ETXM460 | ETXS920 | ETXS919 |
| ETXM461 | ETXS922 | ETXS921 |
| ETXM462 | ETXS924 | ETXS923 |
| ETXM463 | ETXS926 | ETXS925 |
| ETXM464 | ETXS928 | ETXS927 |
| ETXM465 | ETXS930 | ETXS929 |
| ETXM466 | ETXS932 | ETXS931 |
| ETXM467 | ETXS934 | ETXS933 |
| ETXM468 | ETXS936 | ETXS935 |
| ETXM469 | ETXS938 | ETXS937 |
| ETXM470 | ETXS940 | ETXS939 |
| ETXM471 | ETXS942 | ETXS941 |
| ETXM472 | ETXS944 | ETXS943 |
| ETXM473 | ETXS946 | ETXS945 |
| ETXM474 | ETXS948 | ETXS947 |
| ETXM475 | ETXS950 | ETXS949 |
| ETXM476 | ETXS952 | ETXS951 |
| ETXM477 | ETXS954 | ETXS953 |
| ETXM478 | ETXS956 | ETXS955 |
| ETXM479 | ETXS958 | ETXS957 |
| ETXM480 | ETXS960 | ETXS959 |
| ETXM481 | ETXS962 | ETXS961 |
| ETXM482 | ETXS964 | ETXS963 |
| ETXM483 | ETXS966 | ETXS965 |
| ETXM484 | ETXS968 | ETXS967 |
| ETXM485 | ETXS970 | ETXS969 |
| ETXM486 | ETXS972 | ETXS971 |
| ETXM487 | ETXS974 | ETXS973 |
| ETXM488 | ETXS976 | ETXS975 |
| ETXM489 | ETXS978 | ETXS977 |
| ETXM490 | ETXS980 | ETXS979 |
| ETXM491 | ETXS982 | ETXS981 |
| ETXM492 | ETXS984 | ETXS983 |
| ETXM493 | ETXS986 | ETXS985 |
| ETXM494 | ETXS988 | ETXS987 |
| ETXM495 | ETXS990 | ETXS989 |
| ETXM496 | ETXS992 | ETXS991 |
| ETXM497 | ETXS994 | ETXS993 |
| ETXM498 | ETXS996 | ETXS995 |
| ETXM499 | ETXS998 | ETXS997 |
| ETXM500 | ETXS1000 | ETXS999 |
| ETXM501 | ETXS1002 | ETXS1001 |
| ETXM502 | ETXS1004 | ETXS1003 |
| ETXM503 | ETXS1006 | ETXS1005 |
| ETXM504 | ETXS1008 | ETXS1007 |
| ETXM505 | ETXS1010 | ETXS1009 |
| ETXM506 | ETXS1012 | ETXS1011 |
| ETXM507 | ETXS1014 | ETXS1013 |
| ETXM508 | ETXS1016 | ETXS1015 |
| ETXM509 | ETXS1018 | ETXS1017 |
| ETXM510 | ETXS1020 | ETXS1019 |
| ETXM511 | ETXS1022 | ETXS1021 |
| ETXM512 | ETXS1024 | ETXS1023 |
| ETXM513 | ETXS1026 | ETXS1025 |
| ETXM514 | ETXS1028 | ETXS1027 |
| ETXM515 | ETXS1030 | ETXS1029 |
| ETXM1064 | ETXS2128 | ETXS2127 |
| ETXM1072 | ETXS2144 | ETXS2143 |
| ETXM1076 | ETXS2152 | ETXS2151 |
| ETXM1180 | ETXS1032 | ETXS1031 |
| ETXM1181 | ETXS1034 | ETXS1033 |
| ETXM1185 | ETXS1038 | ETXS1037 |
| ETXM1162 | ETXS1042 | ETXS1041 |
| ETXM1188 | ETXS1044 | ETXS1043 |
| ETXM1189 | ETXS1046 | ETXS1045 |
| ETXM1192 | ETXS1048 | ETXS1047 |
| ETXM1193 | ETXS1050 | ETXS1049 |
| ETXM1194 | ETXS1051 | ETXS1033 |
| ETXM1195 | ETXS1052 | ETXS1037 |
| ETXM1196 | ETXS1053 | ETXS1041 |
| ETXM1197 | ETXS1054 | ETXS1045 |
| ETXM1198 | ETXS1055 | ETXS1049 |
| ETXM1199 | ETXS2398 | ETXS2397 |
| ETXM1200 | ETSX2400 | ETXS2397 |
| ETXM1201 | ETXS2402 | ETXS2397 |
| ETXM1202 | ETXS2404 | ETXS2397 |
| ETXM1203 | ETXS2406 | ETXS2397 |
| ETXM1204 | ETXS2408 | ETXS2397 |
| ETXM1205 | ETXS2410 | ETXS2397 |
| ETXM1206 | ETXS2412 | ETXS2397 |
| ETXM1207 | ETXS2414 | ETXS2397 |
| ETXM1208 | ETXS2416 | ETXS2399 |
| ETXM1209 | ETXS2418 | ETXS2399 |
| ETXM1210 | ETXS2420 | ETXS2399 |
| ETXM1211 | ETXS2422 | ETXS2399 |
| ETXM1212 | ETXS2424 | ETXS2399 |
| ETXM1213 | ETXS2426 | ETXS2399 |
| ETXM1214 | ETXS2428 | ETXS2399 |
| ETXM1215 | ETXS2430 | ETXS2399 |
| ETXM1216 | ETXS2432 | ETXS2399 |

[0892] For duplexes of Table 5:
[0893] ETXM316-ETXM415, ETXM436-ETXM515 and ETXM1180-ETXM1216 have a duplex structure according to FIG. 8A with a 2 nucleoside overhang at the 3′ end of the antisense;
[0894] ETXM416-ETXM435: have a duplex structure according to FIG. 8B, namely a 19mer blunt ended construct.

[0895] Definitions as provided in the above Tables:
[0896] A—adenosine
[0897] C—cytidine
[0898] G—guanosine
[0899] T—thymidine
[0900] m—2′-O-methyl
[0901] f—2′fluro
[0902] s—phosphorothioate bond
[0903] o—thermally destabilised nucleoside
[0904] ia—inverted abasic nucleoside

### Example 9: Inhibition Screen for ZPI Expression in Human Huh7 Cells

[0905] Huh7 cells (human hepatocyte-derived cell line, obtained from JCRB Cell Bank) were maintained in Dulbecco's Modified Eagle Medium (DMEM) supplemented with 10% FBS at 37° C. in at atmosphere of 5% CO₂. Cells were transfected with siRNA duplexes targeting ZPI mRNA or a negative control siRNA (siRNA-control; sense strand 5′-UUCUCCGAACGUGUCACGUTT-3′ (SEQ ID NO: 794), antisense strand 5′-ACGUGACACGUUCGGAGAATT-3′ (SEQ ID NO: 790)) at a final duplex concentration of 5 nM and 0.1 nM. Transfection was carried out by adding 9.7 μL Opti-MEM (ThermoFisher) plus 0.3 μL Lipofectamine RNAiMAX (ThermoFisher) to 10 μL of each siRNA duplex. The mixture was incubated at room temperature for 15 minutes before being added to 100 μL of complete growth medium containing 20,000 Huh7 cells. Cells were incubated for 24 hours at 37° C./5% CO₂ prior to total RNA purification using a RNeasy 96 Kit (Qiagen). Each duplex was tested by transfection in duplicate wells in two independent experiments.

[0906] cDNA synthesis was performed using FastQuant RT (with gDNase) Kit (Tiangen). Real-time quantitative PCR (qPCR) was performed on an ABI Prism 7900HT or ABI QuantStudio 7 with primers specific for human ZPI (Hs01547819_m1) and human GAPDH (Hs02786624_g1) using FastStart Universal Probe Master Kit (Roche).

[0907] qPCR was performed in duplicate on cDNA derived from each well and the mean Ct calculated. Relative ZPI expression was calculated from mean Ct values using the comparative Ct (ΔΔCt) method, normalised to GAPDH and relative to untreated cells. Based on the results of primary screen, siRNA duplexes displaying good activity were selected for dose-response follow-up. Results are shown in FIG. 9. Sequences of RNAi molecules are depicted in Table 5.

### Example 10: Dose-Response for Inhibition of ZPI Expression in Human Huh7 Cells

[0908] Huh7 cells (human hepatocyte-derived cell line, obtained from JCRB Cell Bank) were maintained in Dulbecco's Modified Eagle Medium (DMEM) supplemented with 10% FBS at 37° C. in at atmosphere of 5% CO₂. Cells were transfected with siRNA duplexes targeting ZPI mRNA or a negative control siRNA (siRNA-control; sense strand 5′-UUCUCCGAACGUGUCACGUTT-3′ (SEQ ID NO: 794), antisense strand 5′-ACGUGACACGUUCGGAGAATT-3′ (SEQ ID NO: 790)) using 10×3-fold serial dilutions over a final duplex concentration range of 20 nM to 1 pM. Transfection was carried out by adding 9.7 μL Opti-MEM (ThermoFisher) plus 0.3 μL Lipofectamine RNAiMAX (ThermoFisher) to 10 μL of each siRNA duplex. The mixture was incubated at room temperature for 15 minutes before being added to 100 μL of complete growth medium containing 20,000 Huh7 cells. Cells were incubated for 24 hours at 37° C./5% CO₂ prior to total RNA purification using a RNeasy 96 Kit (Qiagen). Each duplex was tested by transfection in duplicate wells in a single experiment.

[0909] cDNA synthesis was performed using FastQuant RT (with gDNase) Kit (Tiangen). Real-time quantitative PCR (qPCR) was performed on an ABI Prism 7900HT or ABI QuantStudio 7 with primers specific for human ZPI (Hs01547819_m1) and human GAPDH (Hs02786624_g1) using FastStart Universal Probe Master Kit (Roche).

[0910] qPCR was performed in duplicate on cDNA derived from each well and the mean Ct calculated. Relative ZPI expression was calculated from mean Ct values using the comparative Ct (ΔΔCt) method, normalised to GAPDH and relative to untreated cells. Maximum percent inhibition of ZPI expression and IC50 values were calculated using a four parameter (variable slope) model using GraphPad Prism 9. Results are shown in FIG. 9. Sequences of RNAi molecules are depicted in the relevant Tables herein.

TABLE 6
Relative mRNA Expression

| | | | | | Mean | Mean |
|---|---|---|---|---|---|---|
| | Antisense | | Sense | | Relative | Relative |
| Duplex | strand | SEQ ID NO | strand | SEQ ID NO | Expression/ | Expression/ |
| ID | ID | (AS - mod) | ID | (SS - mod) | 0.1 nM | 5 nM |
| ETXM316 | ETXS632 | SEQ ID NO: 362 | ETXS631 | SEQ ID NO: 562 | 0.72 | 0.38 |
| ETXM317 | ETXS634 | SEQ ID NO: 363 | ETXS633 | SEQ ID NO: 563 | 1.01 | 0.54 |
| ETXM318 | ETXS636 | SEQ ID NO: 364 | ETXS635 | SEQ ID NO: 564 | 0.97 | 0.56 |
| ETXM319 | ETXS638 | SEQ ID NO: 365 | ETXS637 | SEQ ID NO: 565 | 0.91 | 0.43 |
| ETXM320 | ETXS640 | SEQ ID NO: 366 | ETXS639 | SEQ ID NO: 566 | 0.84 | 0.34 |
| ETXM321 | ETXS642 | SEQ ID NO: 367 | ETXS641 | SEQ ID NO: 567 | 0.58 | 0.27 |
| ETXM322 | ETXS644 | SEQ ID NO: 368 | ETXS643 | SEQ ID NO: 568 | 0.5 | 0.27 |
| ETXM323 | ETXS646 | SEQ ID NO: 369 | ETXS645 | SEQ ID NO: 569 | 0.69 | 0.3 |
| ETXM324 | ETXS648 | SEQ ID NO: 370 | ETXS647 | SEQ ID NO: 570 | 0.87 | 0.46 |
| ETXM325 | ETXS650 | SEQ ID NO: 371 | ETXS649 | SEQ ID NO: 571 | 0.74 | 0.31 |
| ETXM326 | ETXS652 | SEQ ID NO: 372 | ETXS651 | SEQ ID NO: 572 | 0.99 | 0.33 |
| ETXM327 | ETXS654 | SEQ ID NO: 373 | ETXS653 | SEQ ID NO: 573 | 0.79 | 0.37 |
| ETXM328 | ETXS656 | SEQ ID NO: 374 | ETXS655 | SEQ ID NO: 574 | 0.9 | 0.49 |
| ETXM329 | ETXS658 | SEQ ID NO: 375 | ETXS657 | SEQ ID NO: 575 | 1.11 | 0.81 |
| ETXM330 | ETXS660 | SEQ ID NO: 376 | ETXS659 | SEQ ID NO: 576 | 1 | 0.83 |
| ETXM331 | ETXS662 | SEQ ID NO: 377 | ETXS661 | SEQ ID NO: 577 | 1.04 | 0.84 |
| ETXM332 | ETXS664 | SEQ ID NO: 378 | ETXS663 | SEQ ID NO: 578 | 0.42 | 0.22 |
| ETXM333 | ETXS666 | SEQ ID NO: 379 | ETXS665 | SEQ ID NO: 579 | 0.58 | 0.28 |
| ETXM334 | ETXS668 | SEQ ID NO: 380 | ETXS667 | SEQ ID NO: 580 | 0.91 | 0.57 |
| ETXM335 | ETXS670 | SEQ ID NO: 381 | ETXS669 | SEQ ID NO: 581 | 1.04 | 0.74 |
| ETXM336 | ETXS672 | SEQ ID NO: 382 | ETXS671 | SEQ ID NO: 582 | 1.07 | 0.85 |
| ETXM337 | ETXS674 | SEQ ID NO: 383 | ETXS673 | SEQ ID NO: 583 | 0.84 | 0.51 |
| ETXM338 | ETXS676 | SEQ ID NO: 384 | ETXS675 | SEQ ID NO: 584 | 0.38 | 0.23 |
| ETXM339 | ETXS678 | SEQ ID NO: 385 | ETXS677 | SEQ ID NO: 585 | 0.85 | 0.4 |
| ETXM340 | ETXS680 | SEQ ID NO: 386 | ETXS679 | SEQ ID NO: 586 | 0.75 | 0.36 |
| ETXM341 | ETXS682 | SEQ ID NO: 387 | ETXS681 | SEQ ID NO: 587 | 0.55 | 0.22 |
| ETXM342 | ETXS684 | SEQ ID NO: 388 | ETXS683 | SEQ ID NO: 588 | 0.55 | 0.42 |
| ETXM343 | ETXS686 | SEQ ID NO: 389 | ETXS685 | SEQ ID NO: 589 | 0.45 | 0.29 |
| ETXM344 | ETXS688 | SEQ ID NO: 390 | ETXS687 | SEQ ID NO: 590 | 0.98 | 1.01 |
| ETXM345 | ETXS690 | SEQ ID NO: 391 | ETXS689 | SEQ ID NO: 591 | 0.78 | 0.57 |
| ETXM346 | ETXS692 | SEQ ID NO: 392 | ETXS691 | SEQ ID NO: 592 | 1.09 | 1.12 |
| ETXM347 | ETXS694 | SEQ ID NO: 393 | ETXS693 | SEQ ID NO: 593 | 0.93 | 0.45 |
| ETXM348 | ETXS696 | SEQ ID NO: 394 | ETXS695 | SEQ ID NO: 594 | 0.91 | 0.65 |
| ETXM349 | ETXS698 | SEQ ID NO: 395 | ETXS697 | SEQ ID NO: 595 | 0.88 | 0.49 |
| ETXM350 | ETXS700 | SEQ ID NO: 396 | ETXS699 | SEQ ID NO: 596 | 0.87 | 0.75 |
| ETXM351 | ETXS702 | SEQ ID NO: 397 | ETXS701 | SEQ ID NO: 597 | 0.96 | 0.96 |
| ETXM352 | ETXS704 | SEQ ID NO: 398 | ETXS703 | SEQ ID NO: 598 | 0.95 | 1.04 |
| ETXM353 | ETXS706 | SEQ ID NO: 399 | ETXS705 | SEQ ID NO: 599 | 0.71 | 0.5 |
| ETXM354 | ETXS708 | SEQ ID NO: 400 | ETXS707 | SEQ ID NO: 600 | 0.7 | 0.43 |
| ETXM355 | ETXS710 | SEQ ID NO: 401 | ETXS709 | SEQ ID NO: 601 | 0.69 | 0.34 |
| ETXM356 | ETXS712 | SEQ ID NO: 402 | ETXS711 | SEQ ID NO: 602 | 0.92 | 0.71 |
| ETXM357 | ETXS714 | SEQ ID NO: 403 | ETXS713 | SEQ ID NO: 603 | 0.88 | 0.49 |
| ETXM358 | ETXS716 | SEQ ID NO: 404 | ETXS715 | SEQ ID NO: 604 | 0.98 | 0.5 |
| ETXM359 | ETXS718 | SEQ ID NO: 405 | ETXS717 | SEQ ID NO: 605 | 0.66 | 0.33 |
| ETXM360 | ETXS720 | SEQ ID NO: 406 | ETXS719 | SEQ ID NO: 606 | 0.75 | 0.54 |
| ETXM361 | ETXS722 | SEQ ID NO: 407 | ETXS721 | SEQ ID NO: 607 | 0.68 | 0.48 |
| ETXM362 | ETXS724 | SEQ ID NO: 408 | ETXS723 | SEQ ID NO: 608 | 0.95 | 0.9 |
| ETXM363 | ETXS726 | SEQ ID NO: 409 | ETXS725 | SEQ ID NO: 609 | 0.96 | 0.75 |
| ETXM364 | ETXS728 | SEQ ID NO: 410 | ETXS727 | SEQ ID NO: 610 | 0.88 | 0.44 |
| ETXM365 | ETXS730 | SEQ ID NO: 411 | ETXS729 | SEQ ID NO: 611 | 0.82 | 0.49 |
| ETXM366 | ETXS732 | SEQ ID NO: 412 | ETXS731 | SEQ ID NO: 612 | 0.95 | 0.6 |
| ETXM367 | ETXS734 | SEQ ID NO: 413 | ETXS733 | SEQ ID NO: 613 | 0.92 | 0.51 |
| ETXM368 | ETXS736 | SEQ ID NO: 414 | ETXS735 | SEQ ID NO: 614 | 1.02 | 0.84 |
| ETXM369 | ETXS738 | SEQ ID NO: 415 | ETXS737 | SEQ ID NO: 615 | 1.02 | 1 |
| ETXM370 | ETXS740 | SEQ ID NO: 416 | ETXS739 | SEQ ID NO: 616 | 1.37 | 0.96 |
| ETXM371 | ETXS742 | SEQ ID NO: 417 | ETXS741 | SEQ ID NO: 617 | 0.94 | 0.65 |
| ETXM372 | ETXS744 | SEQ ID NO: 418 | ETXS743 | SEQ ID NO: 618 | 0.95 | 0.67 |
| ETXM373 | ETXS746 | SEQ ID NO: 419 | ETXS745 | SEQ ID NO: 619 | 1.05 | 0.96 |
| ETXM374 | ETXS748 | SEQ ID NO: 420 | ETXS747 | SEQ ID NO: 620 | 0.97 | 0.91 |
| ETXM375 | ETXS750 | SEQ ID NO: 421 | ETXS749 | SEQ ID NO: 621 | 0.81 | 0.39 |
| ETXM376 | ETXS752 | SEQ ID NO: 422 | ETXS751 | SEQ ID NO: 622 | 0.97 | 0.76 |
| ETXM377 | ETXS754 | SEQ ID NO: 423 | ETXS753 | SEQ ID NO: 623 | 0.93 | 0.59 |
| ETXM378 | ETXS756 | SEQ ID NO: 424 | ETXS755 | SEQ ID NO: 624 | 0.93 | 0.52 |
| ETXM379 | ETXS758 | SEQ ID NO: 425 | ETXS757 | SEQ ID NO: 625 | 0.96 | 0.81 |
| ETXM380 | ETXS760 | SEQ ID NO: 426 | ETXS759 | SEQ ID NO: 626 | 0.61 | 0.31 |
| ETXM381 | ETXS762 | SEQ ID NO: 427 | ETXS761 | SEQ ID NO: 627 | 0.84 | 0.82 |
| ETXM382 | ETXS764 | SEQ ID NO: 428 | ETXS763 | SEQ ID NO: 628 | 0.8 | 0.47 |
| ETXM383 | ETXS766 | SEQ ID NO: 429 | ETXS765 | SEQ ID NO: 629 | 0.82 | 0.37 |
| ETXM384 | ETXS768 | SEQ ID NO: 430 | ETXS767 | SEQ ID NO: 630 | 0.67 | 0.38 |
| ETXM385 | ETXS770 | SEQ ID NO: 431 | ETXS769 | SEQ ID NO: 631 | 0.9 | 0.87 |
| ETXM386 | ETXS772 | SEQ ID NO: 432 | ETXS771 | SEQ ID NO: 632 | 0.91 | 0.73 |
| ETXM387 | ETXS774 | SEQ ID NO: 433 | ETXS773 | SEQ ID NO: 633 | 0.86 | 0.97 |
| ETXM388 | ETXS776 | SEQ ID NO: 434 | ETXS775 | SEQ ID NO: 634 | 0.96 | 0.7 |
| ETXM389 | ETXS778 | SEQ ID NO: 435 | ETXS777 | SEQ ID NO: 635 | 0.95 | 0.68 |
| ETXM390 | ETXS780 | SEQ ID NO: 436 | ETXS779 | SEQ ID NO: 636 | 0.87 | 0.51 |
| ETXM391 | ETXS782 | SEQ ID NO: 437 | ETXS781 | SEQ ID NO: 637 | 0.76 | 0.35 |
| ETXM392 | ETXS784 | SEQ ID NO: 438 | ETXS783 | SEQ ID NO: 638 | 0.99 | 0.76 |
| ETXM393 | ETXS786 | SEQ ID NO: 439 | ETXS785 | SEQ ID NO: 639 | 0.94 | 1.06 |
| ETXM394 | ETXS788 | SEQ ID NO: 440 | ETXS787 | SEQ ID NO: 640 | 0.85 | 0.8 |
| ETXM395 | ETXS790 | SEQ ID NO: 441 | ETXS789 | SEQ ID NO: 641 | 0.95 | 0.53 |
| ETXM396 | ETXS792 | SEQ ID NO: 442 | ETXS791 | SEQ ID NO: 642 | 0.62 | 0.27 |
| ETXM397 | ETXS794 | SEQ ID NO: 443 | ETXS793 | SEQ ID NO: 643 | 0.96 | 0.64 |
| ETXM398 | ETXS796 | SEQ ID NO: 444 | ETXS795 | SEQ ID NO: 644 | 0.93 | 0.55 |
| ETXM399 | ETXS798 | SEQ ID NO: 445 | ETXS797 | SEQ ID NO: 645 | 0.94 | 0.66 |
| ETXM400 | ETXS800 | SEQ ID NO: 446 | ETXS799 | SEQ ID NO: 646 | 0.77 | 0.57 |
| ETXM401 | ETXS802 | SEQ ID NO: 447 | ETXS801 | SEQ ID NO: 647 | 0.69 | 0.25 |
| ETXM402 | ETXS804 | SEQ ID NO: 448 | ETXS803 | SEQ ID NO: 648 | 1.05 | 0.95 |
| ETXM403 | ETXS806 | SEQ ID NO: 449 | ETXS805 | SEQ ID NO: 649 | 0.86 | 0.5 |
| ETXM404 | ETXS808 | SEQ ID NO: 450 | ETXS807 | SEQ ID NO: 650 | 0.83 | 0.35 |
| ETXM405 | ETXS810 | SEQ ID NO: 451 | ETXS809 | SEQ ID NO: 651 | 0.97 | 0.73 |
| ETXM406 | ETXS812 | SEQ ID NO: 452 | ETXS811 | SEQ ID NO: 652 | 0.84 | 0.33 |
| ETXM407 | ETXS814 | SEQ ID NO: 453 | ETXS813 | SEQ ID NO: 653 | 0.77 | 0.51 |
| ETXM408 | ETXS816 | SEQ ID NO: 454 | ETXS815 | SEQ ID NO: 654 | 0.89 | 0.51 |
| ETXM409 | ETXS818 | SEQ ID NO: 455 | ETXS817 | SEQ ID NO: 655 | 1 | 0.59 |
| ETXM410 | ETXS820 | SEQ ID NO: 456 | ETXS819 | SEQ ID NO: 656 | 0.98 | 0.71 |
| ETXM411 | ETXS822 | SEQ ID NO: 457 | ETXS821 | SEQ ID NO: 657 | 0.77 | 0.36 |
| ETXM412 | ETXS824 | SEQ ID NO: 458 | ETXS823 | SEQ ID NO: 658 | 0.97 | 0.42 |
| ETXM413 | ETXS826 | SEQ ID NO: 459 | ETXS825 | SEQ ID NO: 659 | 1 | 0.77 |
| ETXM414 | ETXS828 | SEQ ID NO: 460 | ETXS827 | SEQ ID NO: 660 | 0.98 | 0.79 |
| ETXM415 | ETXS830 | SEQ ID NO: 461 | ETXS829 | SEQ ID NO: 661 | 0.96 | 0.62 |
| ETXM416 | ETXS832 | SEQ ID NO: 462 | ETXS831 | SEQ ID NO: 662 | 0.96 | 0.52 |
| ETXM417 | ETXS834 | SEQ ID NO: 463 | ETXS833 | SEQ ID NO: 663 | 1.03 | 0.75 |
| ETXM418 | ETXS836 | SEQ ID NO: 464 | ETXS835 | SEQ ID NO: 664 | 1.11 | 0.74 |
| ETXM419 | ETXS838 | SEQ ID NO: 465 | ETXS837 | SEQ ID NO: 665 | 0.99 | 0.6 |
| ETXM420 | ETXS840 | SEQ ID NO: 466 | ETXS839 | SEQ ID NO: 666 | 0.91 | 0.54 |
| ETXM421 | ETXS842 | SEQ ID NO: 467 | ETXS841 | SEQ ID NO: 667 | 0.8 | 0.27 |
| ETXM422 | ETXS844 | SEQ ID NO: 468 | ETXS843 | SEQ ID NO: 668 | 0.82 | 0.33 |
| ETXM423 | ETXS846 | SEQ ID NO: 469 | ETXS845 | SEQ ID NO: 669 | 0.91 | 0.36 |
| ETXM424 | ETXS848 | SEQ ID NO: 470 | ETXS847 | SEQ ID NO: 670 | 0.98 | 0.62 |
| ETXM425 | ETXS850 | SEQ ID NO: 471 | ETXS849 | SEQ ID NO: 671 | 0.81 | 0.32 |
| ETXM426 | ETXS852 | SEQ ID NO: 472 | ETXS851 | SEQ ID NO: 672 | 0.91 | 0.49 |
| ETXM427 | ETXS854 | SEQ ID NO: 473 | ETXS853 | SEQ ID NO: 673 | 1.02 | 0.46 |
| ETXM428 | ETXS856 | SEQ ID NO: 474 | ETXS855 | SEQ ID NO: 674 | 1.09 | 0.94 |
| ETXM429 | ETXS858 | SEQ ID NO: 475 | ETXS857 | SEQ ID NO: 675 | 1.14 | 0.7 |
| ETXM430 | ETXS860 | SEQ ID NO: 476 | ETXS859 | SEQ ID NO: 676 | 0.92 | 0.71 |
| ETXM431 | ETXS862 | SEQ ID NO: 477 | ETXS861 | SEQ ID NO: 677 | 1.18 | 0.9 |
| ETXM432 | ETXS864 | SEQ ID NO: 478 | ETXS863 | SEQ ID NO: 678 | 0.7 | 0.26 |
| ETXM433 | ETXS866 | SEQ ID NO: 479 | ETXS865 | SEQ ID NO: 679 | 1.07 | 0.31 |
| ETXM434 | ETXS868 | SEQ ID NO: 480 | ETXS867 | SEQ ID NO: 680 | 1.11 | 0.63 |
| ETXM435 | ETXS870 | SEQ ID NO: 481 | ETXS869 | SEQ ID NO: 681 | 1 | 0.8 |
| ETXM436 | ETXS872 | SEQ ID NO: 482 | ETXS871 | SEQ ID NO: 682 | 0.72 | 0.44 |
| ETXM437 | ETXS874 | SEQ ID NO: 483 | ETXS873 | SEQ ID NO: 683 | 0.98 | 0.47 |
| ETXM438 | ETXS876 | SEQ ID NO: 484 | ETXS875 | SEQ ID NO: 684 | 1.05 | 0.75 |
| ETXM439 | ETXS878 | SEQ ID NO: 485 | ETXS877 | SEQ ID NO: 685 | 0.91 | 0.49 |
| ETXM440 | ETXS880 | SEQ ID NO: 486 | ETXS879 | SEQ ID NO: 686 | 0.91 | 0.46 |
| ETXM441 | ETXS882 | SEQ ID NO: 487 | ETXS881 | SEQ ID NO: 687 | 0.74 | 0.36 |
| ETXM442 | ETXS884 | SEQ ID NO: 488 | ETXS883 | SEQ ID NO: 688 | 0.62 | 0.36 |
| ETXM443 | ETXS886 | SEQ ID NO: 489 | ETXS885 | SEQ ID NO: 689 | 0.73 | 0.3 |
| ETXM444 | ETXS888 | SEQ ID NO: 490 | ETXS887 | SEQ ID NO: 690 | 1 | 0.59 |
| ETXM445 | ETXS890 | SEQ ID NO: 491 | ETXS889 | SEQ ID NO: 691 | 0.71 | 0.37 |
| ETXM446 | ETXS892 | SEQ ID NO: 492 | ETXS891 | SEQ ID NO: 692 | 0.73 | 0.27 |
| ETXM447 | ETXS894 | SEQ ID NO: 493 | ETXS893 | SEQ ID NO: 693 | 0.81 | 0.39 |
| ETXM448 | ETXS896 | SEQ ID NO: 494 | ETXS895 | SEQ ID NO: 694 | 0.81 | 0.61 |
| ETXM449 | ETXS898 | SEQ ID NO: 495 | ETXS897 | SEQ ID NO: 695 | 0.91 | 0.8 |
| ETXM450 | ETXS900 | SEQ ID NO: 496 | ETXS899 | SEQ ID NO: 696 | 0.97 | 0.52 |
| ETXM451 | ETXS902 | SEQ ID NO: 497 | ETXS901 | SEQ ID NO: 697 | 0.96 | 0.61 |
| ETXM452 | ETXS904 | SEQ ID NO: 498 | ETXS903 | SEQ ID NO: 698 | 0.4 | 0.24 |
| ETXM453 | ETXS906 | SEQ ID NO: 499 | ETXS905 | SEQ ID NO: 699 | 0.62 | 0.3 |
| ETXM454 | ETXS908 | SEQ ID NO: 500 | ETXS907 | SEQ ID NO: 700 | 0.81 | 0.46 |
| ETXM455 | ETXS910 | SEQ ID NO: 501 | ETXS909 | SEQ ID NO: 701 | 0.94 | 0.68 |
| ETXM456 | ETXS912 | SEQ ID NO: 502 | ETXS911 | SEQ ID NO: 702 | 0.75 | 0.36 |
| ETXM457 | ETXS914 | SEQ ID NO: 503 | ETXS913 | SEQ ID NO: 703 | 0.98 | 0.52 |
| ETXM458 | ETXS916 | SEQ ID NO: 504 | ETXS915 | SEQ ID NO: 704 | 1 | 0.61 |
| ETXM459 | ETXS918 | SEQ ID NO: 505 | ETXS917 | SEQ ID NO: 705 | 0.92 | 0.44 |
| ETXM460 | ETXS920 | SEQ ID NO: 506 | ETXS919 | SEQ ID NO: 706 | 0.86 | 0.4 |
| ETXM461 | ETXS922 | SEQ ID NO: 507 | ETXS921 | SEQ ID NO: 707 | 0.84 | 0.27 |
| ETXM462 | ETXS924 | SEQ ID NO: 508 | ETXS923 | SEQ ID NO: 708 | 0.72 | 0.33 |
| ETXM463 | ETXS926 | SEQ ID NO: 509 | ETXS925 | SEQ ID NO: 709 | 0.76 | 0.35 |
| ETXM464 | ETXS928 | SEQ ID NO: 510 | ETXS927 | SEQ ID NO: 710 | 0.95 | 0.55 |
| ETXM465 | ETXS930 | SEQ ID NO: 511 | ETXS929 | SEQ ID NO: 711 | 0.77 | 0.36 |
| ETXM466 | ETXS932 | SEQ ID NO: 512 | ETXS931 | SEQ ID NO: 712 | 0.84 | 0.33 |
| ETXM467 | ETXS934 | SEQ ID NO: 513 | ETXS933 | SEQ ID NO: 713 | 0.91 | 0.39 |
| ETXM468 | ETXS936 | SEQ ID NO: 514 | ETXS935 | SEQ ID NO: 714 | 1.14 | 0.8 |
| ETXM469 | ETXS938 | SEQ ID NO: 515 | ETXS937 | SEQ ID NO: 715 | 1.17 | 0.67 |
| ETXM470 | ETXS940 | SEQ ID NO: 516 | ETXS939 | SEQ ID NO: 716 | 1.12 | 0.79 |
| ETXM471 | ETXS942 | SEQ ID NO: 517 | ETXS941 | SEQ ID NO: 717 | 1.16 | 0.86 |
| ETXM472 | ETXS944 | SEQ ID NO: 518 | ETXS943 | SEQ ID NO: 718 | 0.49 | 0.25 |
| ETXM473 | ETXS946 | SEQ ID NO: 519 | ETXS945 | SEQ ID NO: 719 | 0.91 | 0.34 |
| ETXM474 | ETXS948 | SEQ ID NO: 520 | ETXS947 | SEQ ID NO: 720 | 1.12 | 0.68 |
| ETXM475 | ETXS950 | SEQ ID NO: 521 | ETXS949 | SEQ ID NO: 721 | 1.25 | 0.84 |
| ETXM476 | ETXS952 | SEQ ID NO: 522 | ETXS951 | SEQ ID NO: 722 | 0.87 | 0.42 |
| ETXM477 | ETXS954 | SEQ ID NO: 523 | ETXS953 | SEQ ID NO: 723 | 1.12 | 0.52 |
| ETXM478 | ETXS956 | SEQ ID NO: 524 | ETXS955 | SEQ ID NO: 724 | 1.03 | 0.62 |
| ETXM479 | ETXS958 | SEQ ID NO: 525 | ETXS957 | SEQ ID NO: 725 | 1.13 | 0.51 |
| ETXM480 | ETXS960 | SEQ ID NO: 526 | ETXS959 | SEQ ID NO: 726 | 0.93 | 0.56 |
| ETXM481 | ETXS962 | SEQ ID NO: 527 | ETXS961 | SEQ ID NO: 727 | 0.89 | 0.36 |
| ETXM482 | ETXS964 | SEQ ID NO: 528 | ETXS963 | SEQ ID NO: 728 | 0.68 | 0.46 |
| ETXM483 | ETXS966 | SEQ ID NO: 529 | ETXS965 | SEQ ID NO: 729 | 0.82 | 0.5 |
| ETXM484 | ETXS968 | SEQ ID NO: 530 | ETXS967 | SEQ ID NO: 730 | 1.06 | 0.74 |
| ETXM485 | ETXS970 | SEQ ID NO: 531 | ETXS969 | SEQ ID NO: 731 | 0.91 | 0.41 |
| ETXM486 | ETXS972 | SEQ ID NO: 532 | ETXS971 | SEQ ID NO: 732 | 0.68 | 0.23 |
| ETXM487 | ETXS974 | SEQ ID NO: 533 | ETXS973 | SEQ ID NO: 733 | 0.8 | 0.31 |
| ETXM488 | ETXS976 | SEQ ID NO: 534 | ETXS975 | SEQ ID NO: 734 | 0.89 | 0.64 |
| ETXM489 | ETXS978 | SEQ ID NO: 535 | ETXS977 | SEQ ID NO: 735 | 0.89 | 0.67 |
| ETXM490 | ETXS980 | SEQ ID NO: 536 | ETXS979 | SEQ ID NO: 736 | 0.91 | 0.56 |
| ETXM491 | ETXS982 | SEQ ID NO: 537 | ETXS981 | SEQ ID NO: 737 | 1.06 | 0.75 |
| ETXM492 | ETXS984 | SEQ ID NO: 538 | ETXS983 | SEQ ID NO: 738 | 0.43 | 0.22 |
| ETXM493 | ETXS986 | SEQ ID NO: 539 | ETXS985 | SEQ ID NO: 739 | 0.59 | 0.33 |
| ETXM494 | ETXS988 | SEQ ID NO: 540 | ETXS987 | SEQ ID NO: 740 | 0.93 | 0.59 |
| ETXM495 | ETXS990 | SEQ ID NO: 541 | ETXS989 | SEQ ID NO: 741 | 1.08 | 0.74 |
| ETXM496 | ETXS992 | SEQ ID NO: 542 | ETXS991 | SEQ ID NO: 742 | 0.73 | 0.42 |
| ETXM497 | ETXS994 | SEQ ID NO: 543 | ETXS993 | SEQ ID NO: 743 | 1.01 | 0.59 |
| ETXM498 | ETXS996 | SEQ ID NO: 544 | ETXS995 | SEQ ID NO: 744 | 0.95 | 0.59 |
| ETXM499 | ETXS998 | SEQ ID NO: 545 | ETXS997 | SEQ ID NO: 745 | 1.08 | 0.53 |
| ETXM500 | ETXS1000 | SEQ ID NO: 546 | ETXS999 | SEQ ID NO: 746 | 0.87 | 0.46 |
| ETXM501 | ETXS1002 | SEQ ID NO: 547 | ETXS1001 | SEQ ID NO: 747 | 0.6 | 0.27 |
| ETXM502 | ETXS1004 | SEQ ID NO: 548 | ETXS1003 | SEQ ID NO: 748 | 0.6 | 0.28 |
| ETXM503 | ETXS1006 | SEQ ID NO: 549 | ETXS1005 | SEQ ID NO: 749 | 0.73 | 0.36 |
| ETXM504 | ETXS1008 | SEQ ID NO: 550 | ETXS1007 | SEQ ID NO: 750 | 0.9 | 0.68 |
| ETXM505 | ETXS1010 | SEQ ID NO: 551 | ETXS1009 | SEQ ID NO: 751 | 0.72 | 0.36 |
| ETXM506 | ETXS1012 | SEQ ID NO: 552 | ETXS1011 | SEQ ID NO: 752 | 0.62 | 0.25 |
| ETXM507 | ETXS1014 | SEQ ID NO: 553 | ETXS1013 | SEQ ID NO: 753 | 1.21 | 0.33 |
| ETXM508 | ETXS1016 | SEQ ID NO: 554 | ETXS1015 | SEQ ID NO: 754 | 1.08 | 0.83 |
| ETXM509 | ETXS1018 | SEQ ID NO: 555 | ETXS1017 | SEQ ID NO: 755 | 1.09 | 0.85 |
| ETXM510 | ETXS1020 | SEQ ID NO: 556 | ETXS1019 | SEQ ID NO: 756 | 0.98 | 0.62 |
| ETXM511 | ETXS1022 | SEQ ID NO: 557 | ETXS1021 | SEQ ID NO: 757 | 0.81 | 0.87 |
| ETXM512 | ETXS1024 | SEQ ID NO: 558 | ETXS1023 | SEQ ID NO: 758 | 0.34 | 0.17 |
| ETXM513 | ETXS1026 | SEQ ID NO: 559 | ETXS1025 | SEQ ID NO: 759 | 0.49 | 0.22 |
| ETXM514 | ETXS1028 | SEQ ID NO: 560 | ETXS1027 | SEQ ID NO: 760 | 0.84 | 0.56 |
| ETXM515 | ETXS1030 | SEQ ID NO: 561 | ETXS1029 | SEQ ID NO: 761 | 0.93 | 0.74 |

TABLE 7
Dose-Response Data Table

| | Antisense | | Sense | | | % |
|---|---|---|---|---|---|---|
| Duplex | strand | SEQ ID NO | strand | SEQ ID NO | | Max |
| ID | ID | (AS - mod) | ID | (SS - mod) | IC₅₀ [pM] | Inhibition |
| ETXM320 | ETXS640 | SEQ ID NO: 366 | ETXS639 | SEQ ID NO: 566 | 556 | 77 |
| ETXM321 | ETXS642 | SEQ ID NO: 367 | ETXS641 | SEQ ID NO: 567 | 172 | 82 |
| ETXM322 | ETXS644 | SEQ ID NO: 368 | ETXS643 | SEQ ID NO: 568 | 101 | 79 |
| ETXM323 | ETXS646 | SEQ ID NO: 369 | ETXS645 | SEQ ID NO: 569 | 268 | 79 |
| ETXM325 | ETXS650 | SEQ ID NO: 371 | ETXS649 | SEQ ID NO: 571 | 274 | 79 |
| ETXM326 | ETXS652 | SEQ ID NO: 372 | ETXS651 | SEQ ID NO: 572 | 607 | 86 |
| ETXM332 | ETXS664 | SEQ ID NO: 378 | ETXS663 | SEQ ID NO: 578 | 81 | 85 |
| ETXM333 | ETXS666 | SEQ ID NO: 379 | ETXS665 | SEQ ID NO: 579 | 130 | 83 |
| ETXM338 | ETXS676 | SEQ ID NO: 384 | ETXS675 | SEQ ID NO: 584 | 33 | 77 |
| ETXM339 | ETXS678 | SEQ ID NO: 385 | ETXS677 | SEQ ID NO: 585 | 1180 | 78 |
| ETXM341 | ETXS682 | SEQ ID NO: 387 | ETXS681 | SEQ ID NO: 587 | 186 | 83 |
| ETXM342 | ETXS684 | SEQ ID NO: 388 | ETXS683 | SEQ ID NO: 588 | 71 | 63 |
| ETXM343 | ETXS686 | SEQ ID NO: 389 | ETXS685 | SEQ ID NO: 589 | 60 | 79 |
| ETXM420 | ETXS840 | SEQ ID NO: 466 | ETXS839 | SEQ ID NO: 666 | 2450 | 77 |
| ETXM421 | ETXS842 | SEQ ID NO: 467 | ETXS841 | SEQ ID NO: 667 | 305 | 81 |
| ETXM422 | ETXS844 | SEQ ID NO: 468 | ETXS843 | SEQ ID NO: 668 | 502 | 80 |
| ETXM423 | ETXS846 | SEQ ID NO: 469 | ETXS845 | SEQ ID NO: 669 | 1660 | 80 |
| ETXM425 | ETXS850 | SEQ ID NO: 471 | ETXS849 | SEQ ID NO: 671 | 1050 | 89 |
| ETXM426 | ETXS852 | SEQ ID NO: 472 | ETXS851 | SEQ ID NO: 672 | 1570 | 74 |
| ETXM432 | ETXS864 | SEQ ID NO: 478 | ETXS863 | SEQ ID NO: 678 | 239 | 85 |
| ETXM433 | ETXS866 | SEQ ID NO: 479 | ETXS865 | SEQ ID NO: 679 | 703 | 86 |
| ETXM452 | ETXS904 | SEQ ID NO: 498 | ETXS903 | SEQ ID NO: 698 | 82 | 78 |
| ETXM472 | ETXS944 | SEQ ID NO: 518 | ETXS943 | SEQ ID NO: 718 | 130 | 77 |
| ETXM492 | ETXS984 | SEQ ID NO: 538 | ETXS983 | SEQ ID NO: 738 | 47 | 84 |
| ETXM500 | ETXS1000 | SEQ ID NO: 546 | ETXS999 | SEQ ID NO: 746 | 607 | 70 |
| ETXM501 | ETXS1002 | SEQ ID NO: 547 | ETXS1001 | SEQ ID NO: 747 | 190 | 74 |
| ETXM502 | ETXS1004 | SEQ ID NO: 548 | ETXS1003 | SEQ ID NO: 748 | 132 | 76 |
| ETXM503 | ETXS1006 | SEQ ID NO: 549 | ETXS1005 | SEQ ID NO: 749 | 322 | 75 |
| ETXM505 | ETXS1010 | SEQ ID NO: 551 | ETXS1009 | SEQ ID NO: 751 | 199 | 72 |
| ETXM506 | ETXS1012 | SEQ ID NO: 552 | ETXS1011 | SEQ ID NO: 752 | 162 | 82 |
| ETXM512 | ETXS1024 | SEQ ID NO: 558 | ETXS1023 | SEQ ID NO: 758 | 76 | 84 |
| ETXM513 | ETXS1026 | SEQ ID NO: 559 | ETXS1025 | SEQ ID NO: 759 | 146 | 77 |

[0911] The present invention is not intended to be limited in scope to the particular disclosed embodiments, which are provided, for example, to illustrate various aspects of the invention. Various modifications to the compositions and methods described will become apparent from the description and teachings herein. Such variations may be practiced without departing from the true scope and spirit of the disclosure and are intended to fall within the scope of the present disclosure.

[0912] In case of ambiguity between the sequences in this specification and the sequences in the attached sequence listing, the sequences provided herein are considered to be the correct sequences.

### Example 11: Murinisation of ZPI siRNA Sequences

[0913] The 5 siRNA sequences identified in a Huh7 cell line transfection screen as being inhibitors of ZPI expression are shown in Table 8.

TABLE 8

| Sequence | Sense | Antisense |
|---|---|---|
| ID | (5′ to 3′) | (5′ to 3′) |
| ETXM342 | AAAGAUCUCCAUGAGG | UCGUGCCUCAUGGAGA |
| | CACGA | UCUUUCG |
| | (SEQ ID NO: 268) | (SEQ ID NO: 148) |
| ETXM339 | UACCAAGGAAAUGCCA | CAUGGUGGCAUUUCCU |
| | CCAUG | UGGUAGG |
| | (SEQ ID NO: 265) | (SEQ ID NO: 145) |
| ETXM338 | GCCUUCAUCCACAAGG | AAAAUCCUUGUGGAUG |
| | AUUUU | AAGGCAA |
| | (SEQ ID NO: 264) | (SEQ ID NO: 144) |
| ETXM359 | CUCCACCUUUGACAAG | AAAUUCUUGUCAAAGG |
| | AAUUU | UGGAGGC |
| | (SEQ ID NO: 285) | (SEQ ID NO: 165) |
| ETXM396 | GGAGUUUUGCCUUCAU | UGUGGAUGAAGGCAAA |
| | CCACA | ACUCCCC |
| | (SEQ ID NO: 322) | (SEQ ID NO: 202) |

[0914] ETXM338, ETXM359 and ETXM396 do not cross react with mouse ZPI sequences and will not be used in mouse PoC studies. These sequences were murinised so that they are homologous with mouse ZPI sequence for use in mouse studies. The siRNA sequences were aligned with mouse ZPI transcripts NM_144834.4 and NM_001301404.1 and nucleotides that mismatched the mouse sequence changed to match the mouse sequence.

[0915] ETXM338 was changed to a C at position 18 of the sense strand and a G at position 4 of the antisense strand to give ETXM1064.

[0916] ETXM359 was changed to a G at position 19 of the sense strand, a C at position 3 of the antisense strand and a C at position 23 of the antisense strand to give ETXM1072.

[0917] ETXM396 was changed to a U at position 2 of the sense strand, a C at position 5 of the sense strand, a G at position 17 of the antisense strand and an A at position 20 of the antisense strand to give ETXM1076.

[0918] The murinised sequences were checked by BLAST search to ensure that they did not cross-react with other mouse transcripts.

[0919] The murinised siRNA sequences are shown in Table 9. Positions changed to mouse sequence are underlined.

TABLE 9

| Sequence | Sense | Antisense |
|---|---|---|
| ID | (5′ to 3′) | (5′ to 3′) |
| ETXM1064 | GCCUUCAUCCACAAGG | AAAGUCCUUGUGGAU |
| | ACUUU | GAAGGCAA |
| | (SEQ ID NO: 791) | (SEQ ID NO: 787) |
| ETXM1072 | CUCCACCUUUGACAAG | AACUUCUUGUCAAAGG |
| | AAGUU | UGGAGGC |
| | (SEQ ID NO: 792) | (SEQ ID NO: 788) |
| ETXM1076 | GUAGCUUUGCCUUCAU | UGUGGAUGAAGGCAAA |
| | CCACA | GCUACCC |
| | (SEQ ID NO: 793) | (SEQ ID NO: 789) |

### Example 12: In Vivo Efficacy Data in a Haemophilia Mouse Model

[0920] Haemarthrosis is defined as a bleeding into joint spaces that is a common feature of haemophilia. A long-term consequence of repeated haemarthrosis is the development of permanent joint disease known as haemophilic arthropathy. Around 50% of patients with haemophilia develop severe arthropathy resulting in chronic joint pain, reduced range of motion and function, and reduced quality of life. Haemophilic arthropathy is characterised by synovial hyperplasia, chronic inflammation, fibrosis, and haemosiderosis.

[0921] The model of haemarthrosis used was the induction of a knee bleed in haem A mice and the appropriate background wild-type (WT) strain, with progression of the bleed into the joint monitored up to 10 days post-injury. Identical studies were conducted twice to increase number of animals for analysis.

[0922] The objective of these repeat studies was to demonstrate that prophylactic administration of ETXM1184 could reduce haemarthrosis in Haemophilia A mice after a joint bleed injury. Fitusiran (siRNA targeting antithrombin (AT)) was used as a reference. Advate (recombinant FVIII) was used as positive control.

[0923] For that, a total of 20 Haem A mice (Bi, L., Lawler, A., Antonarakis, S. et al. Targeted disruption of the mouse factor VIII gene produces a model of haemophilia A. Nat Genet 10, 119-121 (1995). https://doi.org/10.1038/ng0595-119) and 10 WT mice were used in this study:

| | | | Dosing time (pre- | Termination time | |
|---|---|---|---|---|---|
| Group | Mouse strain | Treatment | injury; days) | (post injury; days) | N |
| 1 | WT | Vehicle | −8 | 10 | 10 |
| 2 | Haem A | Vehicle | −8 | 10 | 10 |
| 3 | Haem A | Fitusiran - 3 mg/kg s.c | −8 | 10 | 10 |
| 4 | Haem A | Fitusiran - 10 mg/kg s.c | −8 | 10 | 10 |
| 5 | Haem A | ETXM1184 - 3 mg/kg s.c. | −8 | 10 | 10 |
| 6 | Haem A | ETXM1184 - 10 mg/kg s.c. | −8 | 10 | 10 |
| 7 | Haem A | FVIII (Advate) - 300 IU/kg i.v | 15 mins | 10 | 10 |

[0924] 8 days prior to induction of knee bleed, mice were injected subcutaneously (s.c.) with the GalNAc-siRNA construct ETXM1184, fitusiran or a vehicle (0.9% saline) at a dose volume of 5 ml/kg. Advate was injected intravenously 15 minutes prior to joint bleed induction.

[0925] To induce knee bleed, mice were weighed and anaesthetised using isoflurane inhaled anaesthetic. Both legs were shaved to expose the knee joint. Mice were injected s.c. with buprenorphine at 10 ml/kg for analgesia and the diameter of both knees was measured with electronic calipers. Subsequently, both knees were wiped with 70% ethanol.

[0926] A 30 G sterile hypodermic needle was inserted into the infrapatellar ligament of one knee. The injected knee was randomised between left and right, and the injected side was recorded. Mice were removed from anaesthetic and allowed to recover in a warmed cage before being returned to the home cage.

[0927] Mice were monitored regularly for the first 6 hours and were injected subcutaneously with buprenorphine at 10 ml/kg for analgesia at 6 hours post injury. The visual bleeding score (VBS) of the injured knee was assessed at 72 hours and 10 days post-injury.

[0928] All mice were carefully inspected daily for clinical signs of excessive blood loss. Mice showing clinical signs of excessive blood loss, piloerection, withdrawing from cage mates or grimacing were killed for welfare reasons.

[0929] Mice were taken off study at 10 days post-injury.

[0930] A citrated blood sample was taken by cardiac puncture, under isoflurane anaesthesia, plasma prepared and aliquots frozen on dry ice before storing at −80° C. For that, blood was collected into 3.8% Sodium Citrate at a ratio of 1 to 9 followed by centrifugation at 7000×g for 10 minutes at 4° C. In detail, the following steps were performed:

1. Collect blood by cardiac puncture.
2. Flush the syringe and needle with sodium citrate solution (3.8%), leaving solution in the hub of the syringe (˜30 μl).
3. Following blood collection, expel sample into a 1.5 ml microcentrifuge tube and ensure sufficient sodium citrate solution (3.8%) is added to achieve a 1:9 ratio of sodium citrate:blood. Add the sodium citrate solution to the side of the tube, not directly to the sample. Mix by inverting 4-6 times. If not centrifuging sample immediately, keep in a fridge if available or alternatively on a wrapped ice block and continue to invert the collection tube regularly.
4. Centrifuge the samples as soon as possible at a spin speed of 7000×g for 10 minutes at 4° C.
5. Remove all plasma from the sample and place into a fresh microcentrifuge tube.
6. Aliquot the plasma into pre-labelled tubes (Thermo Scientific: 10775974) as follows:
[0931] 30 μl for potential TGA assay
[0932] 100 μl for potential APTT assay
[0933] All remaining for potential target protein abundance analysis.
   7. Place all aliquots on wet/dry ice immediately.
   8. Transport samples on wet/dry ice.
   9. Transfer samples to −20° C./−80° C. freezer to be stored until use.

[0934] The liver was removed and up to 3 portions of each lobe were placed in RNA later and kept at 4° C. for 24 to 72 hours. Tissue was then blotted dry, weighed and stored at −80° C. In detail, the following steps were performed:

1. Immediately after the cardiac puncture, kill the mouse by cervical dislocation.
2. Make an incision into the abdominal wall and remove the liver as quickly as possible.
3. Place the liver on a petri dish on wet ice, to minimise sample degradation.
4. Cut 3×˜50 mg pieces of liver from each of the following lobes: left lateral lobe, medial lobe, right lateral lobe and caudate lobe. Place these liver pieces immediately into pre-labelled tubes (1.5 ml microcentrifuge tubes) containing 500 μl RNAlater, and place the collection tube on wet ice.
a. Transport on wet ice and transfer to storage at 4° C.
b. After a period of 24-72 hours, blot the liver samples and weigh. Record the weights on the terminal sheet.
c. Transfer to −80° C. for long-term storage.
5. Collect any spare liver and place into separate pre-labelled collection tubes (2 ml microcentrifuge tubes).
a. Freeze on dry ice for potential future analyses.
b. Transport samples on dry ice.
c. Transfer to −80° C. for long-term storage.
6. Clean all dissection tools between animals to prevent any cross contamination.

[0935] The skin was removed from the legs and the knee joint measured. Legs were subsequently placed in 10% formalin before decalcification and slide preparation. In detail, the following steps were performed:

1. Following the removal of the liver, measure and record the diameter of both the injured and uninjured knee.
2. Remove the skin from both knees. Carry out a visual bleeding score and measure knee joints.
3. Dissect the legs from the top of the femur to the ankle joint and remove some excess muscle, being careful not to cause any damage to the knee and associated structures. Place the knees in pre-labelled tubes (7 ml bijou tubes) containing 10% neutral buffered formalin to be processed for histological analysis.

[0936] Both at day 3 and day 10 after induction of knee bleed, Haem A mice that received the GalNAc-siRNA construct ETXM1184 showed a significantly reduced visual bleeding score in comparison to Haem A mice that received the vehicle (0.9% saline) (see FIGS. 12A-12B). Furthermore, the knee diameter of mice that received the GalNAc-siRNA construct ETXM1184 recovered faster following the induction of knee bleed compared to mice that received the vehicle (FIG. 13A). This observation was confirmed by comparing the differences between the diameter of the injured and non-injured skinned knee diameter (FIG. 13B).

[0937] Analysis of the Haem A mice 10 days post injury further revealed less severe bone marrow hyperplasia (FIG. 14A), less severe osteoarthritis (FIG. 14B), less severe chondrocyte degeneration/necrosis (FIG. 14C), less severe haemorrhage (FIG. 14D), less severe haemosiderin deposition (FIG. 14E), less severe haematoma (FIG. 14F), less severe osteoclastogenic bone resorption (FIG. 14G), less severe osteolysis (FIG. 14H), less severe periostitis (FIG. 14I), less severe sub-chondral bone sclerosis (FIG. 14J), less severe tendon degeneration (FIG. 14K), less severe tendonitis (FIG. 14L) and less severe tenosynovitis (FIG. 14M) in mice that received the GalNAc-siRNA construct ETXM1184 in comparison to Haem A mice that received the vehicle (0.9% saline).

[0938] Comparative data between ETXM1184 and fitusiran is provided in FIGS. 15-20.

### Example 13: Dose-Response for Inhibition of ZPI Expression in Human Huh7 Cells

[0939] Huh7 cells (human hepatocyte-derived cell line, obtained from JCRB Cell Bank) were maintained in Dulbecco's Modified Eagle Medium (DMEM) supplemented with 10% FBS at 37° C. in at atmosphere of 5% CO₂. Cells were transfected with siRNA duplexes designed against the target or a negative control siRNA at 0.1 nM and 1 nM. Transfection was carried out by adding 9.7 μL Opti-MEM (ThermoFisher) plus 0.3 μL Lipofectamine RNAiMAX (ThermoFisher) to 10 μL of each siRNA duplex. The mixture was incubated at room temperature for 15 minutes before being added to 100 μL of complete growth medium containing 20,000 Huh7 cells. Cells were incubated for 24 hours at 37° C./5% CO₂ prior to total RNA purification using a RNeasy 96 Kit (Qiagen). Each duplex was tested by transfection in duplicate wells and the experiment was repeated three time.

[0940] cDNA synthesis was performed using FastKing RT kit (with gDNase) Kit (Tiangen). Real-time quantitative PCR (qPCR) was performed on an ABI Prism 7900HT or ABI QuantStudio 7 with primers specific for human ZPI (Hs01547819_m1) and human GAPDH (Hs02786624_g1) using a TaqMan Gene Expression Assay Kit (ThermoFisher Scientific).

[0941] qPCR was performed in duplicate on cDNA derived from each well and the mean Ct calculated. Relative target expression was calculated from mean Ct values using the comparative Ct (ΔΔCt) method, normalised to GAPDH and relative to untreated cells.

[0942] For the inhibition of ZPI, the siRNA duplexes ETXM1184, ETXM1199, ETXM1200, ETXM1201, ETXM1202, ETXM1203, ETXM1204, ETXM1205, ETXM1206 and ETXM1207 were tested (FIG. 21).

The application's sequence listing, which the Patent Office published only in electronic form, follows.

SEQUENCE LISTING (820 sequences)

SEQ ID NO: 1 - DNA, 19805 bp, Homo sapiens
  misc_feature 1..19805: note = Description of sequence: ZPI gene
  source 1..19805: mol_type = genomic DNA
aatgtgggttggagcccccatacagaatctctatgggggcactgcctagtggagctgtgagaagacggccaccgtcctccagacccctgaatggtagatccaccgacagcttgcgccatttatccggaaaagccacagacactcaacgccagcccgtgaaagcagccaggagggaggctgtaccctgcaaagccacaggggcagagctgcccaagaccaagggaagctaccttttgcatcaacgtgacctggactcaaaggagatcattttggagctttaaaatttgactgacctgctggatttcagacttgcatgggccctgtaaccacttcgtttaggccaatttctcccatttggaacagccgtatttacccaatacctgtaaccccattgtatctaggcagtaactagcttgcttttgattttacaggctcataggcagaagggacttgccttatctcaggtgagactttggattgtggacttttgggttaatgatgaaatgagttaagactttgggggactgttgagaaggcatgattggttttgaaatgtgaggacatgagatttggcagggccagaggcggaatgatatggtttggctctgtatccccacccaaatctcatcttgaattgtactcccataattcccacatgttgtgggaagggacccagtgggagataatttgaatcatgggggtggttccgccatactgttcttgtgatagtgaataagtctcacaagatctgatgcctttattgggggtttctgcttttgcgtcttcctcattttctcttgccgccaccaggtaagcagtgccttttgcctcccaccatgattctgaggcctccccagccacgtggagctgtaagtgcatttaaacctctttctcttcccagtctcgggtatgtctttatcagcggcgtgaaaatggactaatacactgtggttatgtattatagtcatatgatattttcatatttttggaagctgggtgaagggtagatgtggagaccatgatttttgcaaatttttttaagtttaaagttatttctaaattagaagtttaaaaagaagaaatcacataagccataacacaatagaaagatgtctttaaagttcaaggcaggagggatgtctggaaatcagcgagaaatttgcacctgtgtgtgcatgtgcatatgtgtgtgtgtatgttgcaaggacttggaaagccctttttttcctacctctgtactactgtggggggaggctaaacttgacttcttcccatcttagttcttttttgggatagactcctgtaacaaaagacagacaagagaaaaatcagcttacaacatgggccatgcacttcacacaggagaaacctgcatgaaaagtaactcaaaatggtgccttagaactccacttacctttagtaaagagcaataaattagcaggaaaatcatggatcgggacaagggaagtggttttatgcttccaagggcaggaaatcatggaaggtaaatatatgggaggaaactaaaggaataaggcttgtttgcatattcctctgatgccatctctgggttgataagagtctagagtcatttccagtaaagatgaatttttatctgtctttaggaagaaagggggaaagatagagaaaactatttctccatttgctgtttcttaattaccttcagttcaaaaataatttttatatcagaaaggcatatttagaggtatgttagtttattttcacactgctaataaagacatacccaagactgggtaatttataaagaaaaagaggtttaatggactcaccgttccacatggttggagaggcctcacaatcaaggcaggtcttacatggcagcaggcaagagggagaatgagagccaagcgaaaggaatttccccttaaaaatccccttataaaaccatcagatctcgtgagacttactcactaccacaagaacagtatgggggaaaccacctctatgattcaatgatctcccactgggtaccccccaacaacacgtgggaattatgggagctacaattcaagataagatttgggtggggacacagacagaccatatcaaggggtaacatagtctggtttcctttactacccacctacccaaacacccccttcatctgatccacacaaagtaaactcttgcagttctctcactgtttcctggagtctgcttttggtctcataggactgccctaacgcttgtttttcagacgtttaaccctgtaggtctctggacaaatttgctttagaagcccctcgatgtcgccctgaagagtggctttcagaagttgtgcctcctgcctgaggggagttccaggaagggttctgcatcgcctatgagtttatctggatcaccagaggccttcccgtcagagctttcccaatcgtttttggccaaggagtgtgagaagctaaagttcataacaactggaagtcagacagcctggtctattctgctttaactctagcaggaaaggccttcatggtggggcctgaatatcttcctttataaaatcaaagcctggggacagggttacttacttctgaggttcaatctggctctaaaattatgcaacaaatgccattcctttagcacttccttcctaccgggcgagatactcaactccacaggcaccacctcagttcatcctctcagaagtcctaacagctcagcctggggcaccccattttacagattagtaaactgaggctaagagaggttaggtagcttgttcagggtcatgctgctggtaaaagagctcaggctacagtgctatgcattgagttttctcactttcccatctaactggagggctaaaggtcaaagagtgggcagctcccttgttgggagctgtacaggaataatgtcctccctgaaggagggggacttctgagccacaccctggggtccagggctcacagccttaggagcaaaatcgtccacccccttcctggttcctcggtgctgcagagatattcataggacagagtctgagttctggccacttaacagaggaagaaaggctggctcggtgaggttaacttacatcccagcagctaggaaccgggagcagaggacctcagattcacaccagggcaggaggcaatggcctggctgaagccttcacaatcttcccaatatactccgctgccttcctttataaggatccatttctgaaaccctgtgccctggccaggcacggtggctcacacctgtaattccagtactttgggaggccaaggcaggaggaccacgaggtcaggagtttgagaccagcctggccaatatggtgaaaccccgtctctactaaaaatagaaaaattagcgtggtggcaggcgcctgtaatcccagctactcgggaggctgaggcaggagaactgtttgaacctgggaggtggaggtctcagtgagctgagacagacagtgcctgggtgacagacagagactccgtctcaaaaaaaaaaaaaaaaagaaagaaaccctgtgccctaagacctgcacactcgctggctccgctcagacatttagcaaagcagacaccttcccaggcctggaggaaacagcccctgctttttgggaatccacaagcccgcagctgcagagctcgacctggatgggcaggcaaaggctgactcctgtgcgtggtgtgagtccagcctggcccctctacaccctcactttcacctcttaaagaactgcctattaacagagcaggtactgcccaaaaggaacactctggaaacttgttgggacacttctgcctttcacaaacgtttggggggagtactactagcatttaaggattgagggttagcaatgccagacataccagaacacgcagggcagtctcccatgatgaagaggccgccgggttccccaggactcacatgtccacctcaagttcacgtgggattatctgagcctagactgtcagtcctggggctgctttatttcatataaaaatataatatttatccaaggttttactacacactgcattttctgtgaagacaatgaccgtgtaaatcagggaaagatctatattttattttgtttgaaactttaccaagcattatttaccatttcaaaagctctatccctggtagtaccattggttttcttgttcaccggccagcagtgagcagcacacaagcgacctcccgtgggctccacattggacagcctcactgcacctgcccaggcccttaggccacagcactgccatattcagggacacattattctcttttattatgcctccatattatcattacagcattatcttttttttaattttgtgggtagattatattagctatacgtttcacttcaatggtagtagtaaggggcacataacaaaatatttacttatatatattaaaaaagagagtctgagaagtctgaaaagttttgccataaacggtctccaccagcctcaactctgagtgcccgaggattcagtctcaagtccagcaacattgtgaagcaggaaatttaccttgaaaggagctatgtactctaagtagtgatttacctgtctgcctcccccactggattgaccagttccttgggggctgagagaacaggtcctgaacatttctgctgtgccccccaacccacatcctcatagtgtccagtaccaggctggggactcaggaagcatccatgggatcccccagtgccttctttctcgaggtgttcagcacctagaacagctcaagacaaattccccacaccccacccagacagagctgaatcttactggggcgaagccttgagttgcaaggcagaagctctcgtgatgggatttgggtcatattccgggttataggaggagctggggagtatgggaagcctcccacttggtctttggttttccagaaactccaccatcacaagcaggatgttaatcagtaaccgtcccacaggggatcatactttggaatagcaaatatttgctgaaggttctgggctgcaaagctgaagctttggtttctgctctaaatgaaggacttttccaggacccaaggccacacactggtaagaggcagtgggttacaggagaccttcaatgagtctaatcagggagggaccgggaaggatggtatcatccctgggcgggctccaacgtgagggctgtgtggctgagcagtgcaaagacctccatcctacactccacagggactgtacatacagattgggagctggagtggggtaagaggcgaattatagacacaaggggctcctctgcaggaaggaggccaagggaaagaggcttgaaaggcttgatatttcacccaccaccactcactgccggagtaagcaggtctccccttcccagggctgaggggaggcagggatgtgtgctgtcccagggctgagaagtggcaggtgagctggtgattccttactgcccaggttctgtctaggaaggtgcgtcctcaccatgctggatggtgtcctagtccaggagcaccccctgagctcctggcctagactccaaagggttgggtagatgagcaaagactttacaaagaccttaggcgatatatgtccaggagcacccaggaattactgggctaccactgcagactgcaggacaagctccaagaacaggaaggtaagactcagcatttggaggtggtgacatctagttggcgtgctgggctaatttcctgaccattgtacagggagaagtaaccttgaattcaggagtattctgtgtggtcttaatgtagaaagtagcactaaatgatgccacgtaatcgttttagctcaggctcctctaacaaaacaccacaggctgggtggctccaacagccattgatttttcacagttttggaggctgaaagtccgagtcagggtgccagcgtggccggattctggtagggctgtcttcttggcttgcagatggccaccttcgcaccgtgtcctcccatggagaggaggtgcggagggggactctgctctcttcttatgacagcactagtgctatcacaggggccttgccctcacgacctcatctaaacctaatcacctcccaagcgccccaactctattgccatcacaatggtggttcgggcttcaacttattaattctcaggggacacattcagtccataacaataaaagcgtgaaactgggctgcgtttacactgaaagagctatttacccaacgtttacaatacttgggtgacctgttgaatgcaggcttgccatttagagtcaaaaagagcttcctcaacagtgtcctttgggaaacacagtggaagtatttcactgcttctacaggggagagggtagtgccgttcagactgcagagtgaggccctgaattccggggtgccattcagcccgagcaaggggcaacatgctgggccctggcgctggaggcggttttgtcccaggcatagataaggactcagcccctgcatcaggaagaggcctggcagcaccgcctgtcaatacattttgccgcaggtgaccttggtcaagaataagggtctctgctgatgggaactactgtgaggccggcagcatccaccctgcgctcactgggctgggtggcctaccccacccagaccctcccagggcagtgggcccagagagaggatgagggagggcaggtgtcccaggggttctgcccagccagcctctgggatcaggcctgcagtgtggctgaacaccagaactgagtttggacacagccaggtggcccaggccagtcccaagccatgtatttggatggaaaacatggaagtattcaggagccaggctctgtgtccaaggatgtggagggagcctaaaaggcgacagagaaggggacagctaacggtgaagaagtgtagctcccacactgcagcctaggacagtgagaaccggcatgcagcccaggtggctgagggctctatgaagccacagtggagggagcccagaagtgggttgtatgaattgcggggcctcctgctacccgggagctgcagctataggaaggaaggaaggaaggaagacctccaaggaactgtgtagcagaggtgcagtgcaaagagaattttgataaaaaatccaggaaagctccaatactttcccccttccttgcctaacgggcatgcaggcactccaatccccagccaaacagggcactgggcaaggccggccacccatctggatgggcagcctgacgaccagatggtcagggcagtgaatgaagcagatcaaggaaaggtgtgtgaggacccctgattccacctgcttggacccccaccttctgtgctgcctcctgctcccagagtggactctcttgccctggccctcagggaggagacgggatgaatgaaaacggggtcaggactgagagctgcctgccggcctggcagggaatgggaactggaggaggttttgctctgtgaaataatgtcccctctttgggtgagcaaatgtcacccacacttgctctaggtctccctggggcagggctaacctacttgagccacaggaaggaggcagggtccctgaagaagcttttactatccacaaagacattttaggaggcattaaaaccatctctatcctctcctctccacaggaagtcttgcagctgaagggaggcactccttggcctccgcagccgatcacatgaaggtggtgccaagtctcctgctctccgtcctcctggcacaggtgtggctggtacccggcttggcccccagtcctcagtcgccagagaccccagcccctcagaaccagaccagcagggtagtgcaggctcccaaggaggaagaggaagatgagcaggaggccagcgaggagaaggccagtgaggaagagaaagcctggctgatggccagcaggcagcagcttgccaaggagacttcaaacttcggattcagcctgctgcgaaagatctccatgaggcacgatggcaacatggtcttctctccatttggcatgtccttggccatgacaggcttgatgctgggggccacagggccgactgaaacccagatcaagagagggctccacttgcaggccctgaagcccaccaagcccgggctcctgccttccctctttaagggactcagagagaccctctcccgcaacctggaactgggcctcacacaggggagttttgccttcatccacaaggattttgatgtcaaagagactttcttcaatttatccaagaggtattttgatacagagtgcgtgcctatgaattttcgcaatgcctcacaggccaaaaggctcatgaatcattacattaacaaagagactcgggggaaaattcccaaactgtttgatgagattaatcctgaaaccaaattaattcttgtggattacatcttgttcaaaggtactttgataatgttctgctctcccaaggccacagggccctacgattgtctctccctttcctttcgttaggccagcatatgattaacgctacgtgattttctatgaatgtgttttcacgtttcaaaaacagattgatacacatattgaacagtgccagacgctgtcatttgaggcccttccctggtatcctatgtgcttgtagtccttattattttcagagcactctacatagctcccctctgacacttagaagcatagggtctttccaaaaaacagggggctgggggattatctgggggatttaggattgcatcattgctccttcatttttactttttgaccaactctctgcccttagattcctattatagaaaatagggacactccacctactacagtgttagaggctaaatgagacaatgaatgtaaagtgcccagatgggcttggcacatagcagacactgagtatctattgtttacttgttcttccaaactgccaatcagcaggtagagcaggagttgtctcctttctaaagatgaaaccagctcagagacgttagcttgatcaaggtcacacagtaagtggcagaggcaaaacccaaacaagggcctcctgaccccctgatcctaggttctgtccagccctgcctccctaatggggcactggacgtgggttggatgccactttcgcagagctggcaccagacttacaaagccccggcaggggaagccactttacaaccagccaggccacacccccagggcagacgtttatgtagagagtaatgtacctgcctgctagtagcctctgcattgtggggccttctctcagaaccacactaaacagtgggtgggtgagaagtgtcactcctgccaccttggactctgcatgtgcttgtgcctggtgtgaatgagacaaagtggcagtcagaggtgccaggcaaaggcttttctctaagctggagccaactatgagggaacgactgtgaattccgttcaggtccaggacaatgagaggagccagggattgttaggaaacatttccctgctttcgtgtgcgattcccaatagggcctgcgagtggagctgcattttgctagctgggctagaggacggggaaaattttggggaaatttattttgcctgcctgagctgtggaaaagccaacccaattagggaacgcctttcctagttggaacgagaagacgagaagtgagagaagtgagatagaaggctccctctctattatttgagcaagaacaatgcttttcaaagagggaatttctgcaatgagttcttctcttacttgttcagggaaatggttgaccccatttgaccctgtcttcaccgaagtcgacactttccacctggacaagtacaagaccattaaggtgcccatgatgtacggtgcaggcaagtttgcctccacctttgacaagaattttcgttgtcatgtcctcaaactgccctaccaaggaaatgccaccatgctggtggtcctcatggagaaaatgggtgaccacctcgcccttgaagactacctgaccacagacttggtggagacatggctcagaaacatgaaaaccaggtacaactcttgcccacaccctatacaaactctacctttctgtactggcaaacgctcagcacaatttcattgaatgcaccgtgatttaatgtctcctccagtgagctataagtttcctgaaggcagggcagcatttgtctttttttccactctatccccagcatctgtcacagggtgcctggctgattcattcattgagtccatcagtattttacgttctgcgactgtgataaatatatgatgccagggatccatcagcaaacaaaacaggcaaaattagtctgccctcatgcagcttacattctattgaaggaagacaaagagtaaattaaaaataggtaataatgcagggaaggggacaagaagcatcatcaggatgcagatggaggttagacaaggcctctccaagaaggtaacagtaagcaaacatctgaagatgaaggataaaccatgtggatatattcggggagagaagtgttatgttacaggcagaagtgtacaagttctgggatgggagtgtacctggtgggtttgaagaacatcaaggagacaagtgtggcttcagcagttggagataaaatcagagaggaaacaggggcccagtccccagaaaagacttgggctttcctgagagaggcaggaagccactggatggttctgagtagaggagcaacctgattttgacttctgtttttaaaggatcacataagctcctgtgttgagaaaagacactagggggtaaggatggaagcaagggagagtggttagaaagttactagcaatccaggtagagatgctgctacctggactgcggtggtggtagtggaagtggtgagaagtggctggattctggatctattaggaagtgcaggatctgctaatcgattggatgtgggtgagagaggtgtcaaaggtgatcacaaagtttttggccttagcaactggaaagacggatttgccatttactgaaagggggaggaacaggtctggggtaagtgcagaagttcagtcttaaacacttggatcagaaatatctattagacatccaagttgagatgtcaagacgacaggtggatctggagtctagggtgaggtccaggccggagatataaattcggtcatcaacacagaactagaatctagacacatgacagggttggggtctgtaaatatagaggagaggaaaagaaagcacagagtgggcactgaaatgtctgcccaataaattaatccacctattggagtacaaggaaaatggctgcaatacgaattccatggctatggcttctgaatcctgtgactcagattttggcagacaagtgcagctaaaggtccccagggttagttttatcttcattattcttctttcatttttcttcatatctttagcacctaacaatgaaccccaaacatcataagccctcaagtaatgtttgctgaatgaataactttttaaattaatcttcaagacacgtcatgtcctcaattatttttaaataaataaaaaaattttattttgagccacagaactcatcttttcaagcaacatattttcaaaggaggactccagtatacaaaatagatggtatcagagcttctctggctaaagacgggtaggggttgaaagttttctttgctcccctccccatccatccccagactcctcgggtctgcagaatccaggagctgaaaacagccatcatccaggaggctgcaggactgctgaaagcagctgttaactcaggttttttttaaaatatagggaaatgaacacataagtactttgctaaagaaaacgtgagtcactggctgaggaataaaactcattcactgaagctgaagtactatttgataagctagaaatattttccctgagtagaccactgtaaaagaatggcatgaactacatagtcaactgaaagactcattaatggaaataatcttaaagaacaaaaattgtgacctttttggtgtccacagactagggctttgtctacatttcaccatcatctgttcttgtaccacagaaacatggaagttttctttccgaagttcaagctagatcagaagtatgagatgcatgagctgcttaggcagatgggaatcagaagaatcttctcaccctttgctgaccttagtgaactctcagctactggaagaaatctccaagtatccagggtaagtcaggatctttcatcagagcccaacctcagcatgaaatgtcaccaaaacaaatgcttttacaaaccatttaactttgataaaatacctaattgtagtggaaaattagatttaagtcccaaatacttgaaatagcacccaggttggatgttttaagaatttcaagcaacttcattaaaataacttttcaactaatttattttaagcagacctctccccctctgcttaaagtgctcagggagaaatttgaccctgaaatagaactggtttacagaggcatcatcatttatgttgaatacaacttgaatagttcatgaaattacaccacctttacaatgaaacaaacccctagacatcatctagcccaacttctccctccttgtggaaatcccctccatagccctacgaaatagccctccaacttctcttcctcttcatgcttccagtgacatcaaactcaccatttctttgaagagctgcccaatccacaaatagctaaaattgttatatgtatatatatatatgtgtgtatatatatgtatatatgtatgtgtgtataaatgtatatgtgtgtatatgtgtgtgtgtatatatatatacacacacatatatatatatatggagagagacatacatatatatatggagagagagagagagagagtcctgtaacttctgattcatactttttggtcctagttctatctctaaaacttctaagaacaagtttagtcaccatccacatagaatcccttcagttactcagtgtttctcagtggaagggttcttggttttgaggggaactgcttgttgtccagagcagttgtgcatgttgcagggaactggttagcattgctggcccatgttcactaatgccagtaggaaactccagtcatcactataaaaatgctcccacacatttccaaatggcagctacatctctctacattcttccttagctgtgtggtttaatattttcttatacaattgcaattttcaattccaagagagactaaaaatggcatccacttaagtaggacacagtagggtaactgtggcctggaatcaggtcttacaacctcaagagaggtaagacaattaaataaaacaatccgtcagaccagcacctgaaagtgtttctgctatgaacacatgaaaaactgaaatgcgctgctgctttatgaagggtcatcatgaaatttaaactgtaaatgattaaatattctccctctgtttgctctggggaattaattttcctctaggaaatcagggaatttcctggagtgaaaatcagtgtaattacatgttatgttttcattatctcttataacacagtaattatataggtacatcactcatatcacatcttgtttctgtaaaaaagggcctcccaaacatagcaagcagccacagtataggcagccagaattcaggaaggctccagggacccctgggcttggcccagaaaaatgcctcagagtagtaccaggtgctgggaagctgctacagaagactagccattccctgcctccaccttgcctgccaaaaggaaagtcagaggactcaagggatccagggatcaagggatccaggcagcttgaaaaccttttaggagcaccagctcagctcaagaattagtagcataaattacatgctcaataaagatttgatgcatgagtgcatcctgagtccatgcccggaatgtgtttcacatattccacaatacttcacattgggttcctgaggtctcctggtattgtttaagactcctgtggcagtccctggtgcaaccccagaccactcctcttaacgtagatgggcctgctccactaaatcccaggagcatgaccccatgggtaggaccactgtgaagaatttcaaggggctcatttaattcctcctttgcactgccacacaaatggtttttcacattatttcctttttccaggttttacaaagaacagtgattgaagttgatgaaaggggcactgaggcagtggcaggaatcttgtcagaaattactgcttattccatgcctcctgtcatcaaagtggaccggccatttcatttcatgatctatgaagaaacctctggaatgcttctgtttctgggcagggtggtgaatccgactctcctataattcaggacacgcataagcacttcgtgctgtagtagatgctgaatctgaggtatcaaacacacacaggataccagcaatggatggcaggggagagtgttccttttgttcttaactagtttagggtgttctcaaataaatacagtagtccccacttatctgagggggatacattcaaagacccccagcagatgcctgaaacggtggacagtgctgaaccttatatatattttttcctacacatacatacctatgataaagtttaatttataaattaggcacagtaagagattaacaataataacaacattaagtaaaatgagttacttgaatgcaagcactgcaataccataacagtcaaactgattatagagaaggctactaagtgactcatgggcgaggagcatagacagtgtggagacattgggcaaggggagaattcacatcctgggtgggacagagcaggacaatgcaagattccatcccactactcagaatggcatgctgcttaagacttttagattgtttatttctggaatttttcatttaatgtttttggaccatggttgaccatggttaactgagactgcagaaagcaaaaccatggataagggaggactactacaaaagcattaaattgatacatattttttaagatgtttgtgcaatctgtctggtattttaagcttgtttctaagaaccttagttacttggctaaagactagctgggtagaatatcttttctctgttgctcacatattttcatttttaaaaagttgcagatgagaacactatgtcaagataaagcctttgggaggaacacatgtaaacattctccttgagtcatgtgcttctctctctttccttctctctggtgcaaaataagtgttttattttaatctattacggagtcatttcttgctgactgacatcagaagaaaatagctctaaccagtcctgatcacagcatctgcttccatggtgcatcaaatcgcttggcagaggcattggctgaatcacagatcatctagttcaataccttcattttacaaaggaaagaaagagggacccagaaacaggtccatattcttactttcatgggccctaggcacgtttaaccttgtagactcctccttccttcatgaagatatatatgttctatggctgcattggtagaaagatgaatatattcgtctttcaaagttgcatatctagcttcaaagttatatgtctagcatatggcaataagcaaaacaccttcatgggcccttacagtactgtcagccttgggcactgtgtcttctgcatctagtggataagtcataccttatataccagtgggaacaaaatacttgtccaaggtcttccagtgtggcaatggcagagtcagaagcctacctttcctgagtctagtctccaagccctttttactcttccttccatctaaaacatctgatggggaccaggtaaacagcatgcactacagctacccatgggggttaaacagaatataagcatgaactttgtcccagggtgaaaaggaaaatcgtaaatatccctgatcttccttaggcagttattttctgtcacagaaacagaaaagactatattcagagaatcctgaatagagctgatttacagtgtgaactatgttaactaaatgcctaattggatttctgtctgtctgctatctaatgtttaaaaaaacctaaaattcatttattgattagttgtttaatataattcagagtaatgtgaataggtaataatattaatatgcagtctaaatactgacttttcatcattccataacctggactgatgaaaagtcagtatttagactgcatattaataaaataaaattcattcctgtattcattccaagagtactaattgacacttatgaagggacaggcaattctaggccctagagggccaaagacagaggactaactctatctgacattcttaagtcaccttgtttgtgttcaattagtcagatttgtttgtggaaaaatagtagaaagaggaataaagtagcatccagtccaatttcccacttttaagagatgaaatctggaaaaataagtctgtgagagcacaatactcactgaaatcaatatggccaaacccagtaataaaaaggtacattattattgaaggattcatatagcatgcagataaaaaactcctgccttcttcccaccacatacactgcaaagcaacaacagcataataattgtatttaatatactactctttaaggtagaaaatggacctattctatattttaaatatactttttaatgttccctcacatttgctttaagaagttcctaagacactcagtttcagatttcccaagtacacaggcatgacagaaaaacgcagaccaataaaaaatgtaacttaccttacacaaatacatacacacaaattcagggtttccaaccgagcgggggaaatcttaacattgtagaagtcttcactatatatgtgtcgagtttttgtttttgtttttgtttttgttttgagacagagtcttgctctgtcacccaggctggagtgcagtggtgcgatctcagctcactgcaacctccacctcccgggttcgtgccattctcctgcctcagcctcccgagtagctgggactacaggcacctgccaccacgaccggctaattttttgtattttaagtagagatggggtttcactgtgttagtcaggatggtcttgatctcctgaccttgtgatctgcccgcctcggcctcccaaagtgctgggattacaggcatgagccaccacgcccggccaagtgtcgagtcttaaaaattgttcctacacagacacactcaaccacacgttctcacatatatatgctgtaacaactgagaacaggttactgacttaatctaattcattctatcttcattgtaaaacttccactccagctgaagagcctgtttcatttcaattcaaagatttctcatatatccactaattgtatggcaaaactgactcatctccagactaagatattcaagctcaggaagtcaaataatagaaatgattttttaaatgtgtaagaggttataaagaaaaactttatgtgctccttatttaacctctattaagtaaaatcctttatagacctatctccatttctgcagtaaaagtgagctctacagttagcttgtaaggctaactagtgaaattcctggacttgttcttaaaaatgcaagttttagtaattaacaaaatgatgatgaagatgtcccttttccctacaactacagatggagggagatttttctttgccatacaactagcttaaaggattaatttgataagttgttaaactgagaactttcacaaaagtatccatcttgtttttgatataaatggagatacatgtagttattcataactgtcagtaatttgctgtttatcctgtttctatatatctgtccttgagagtataattttaataaatatttcaaagattttaggaaatgtcatgttctgttaaaaaacttccaaaagtaattttgatgaacagttttgataacttagtactaactaggactaagactgcaattgactgctctacattcctgaactttataagcagtagttgtttctctctgtcaaatcagtgtccccttttcccatttgcatcatgggaaagtgaaaccttataattctgctaaatttattataacaaatacattgaaattctccattttattaaattaatagaatgttatgaatcaaagcaccaaaaaaactgatgcaattttgatgtctcgttctgtaccacattctccagatcttaatatattcagttccacattattggtgctagtaggagacataatgaaaacagttaaatgaaatccacagcgagtatactgattaaccagtactgtcaaatttctcatacctattgaattttaactactgacaaaatgagcagtaacaattccatttacctgattgtcctttggcaaaggatattattaagaatcactaaaaatagccataaagaagccatatggaaggaagaaggaaaacaaatggcatgaaaaggtctctcactgagtaactatgctcttatagttgacgctggtatatttcttttattcactacctaaaaatgaactatcttactctttaattatagaataaaaactgcaggaaagtatttaagactttttttcacaaacacaggtatctcattaacctatgttttattttgagtaaattcattattcattatttcacattataaaaagtaaccacacatacatatgcattcacaaattagatcatctttatcatacatcaatatattttaaaaaacaaatatcttctaatatcaatatagttatatgctgattgcattttgaaatagagaagctgacaatagcttcacacggtatatctcaagaactgacagtttaaaattaagaactgtatatattccacaggcaaattttgatggaaatattagcattagtacaaataaatgctgttgacatagcttaagcatgatagcttggaataacagctgattcagactagattcatcattttaaataaagacaagtacaatctaaaatgtaaacaaagtatttataaaataaattctctaggaaataaagaaaatcatcaatctattatttttaaggtatttatagctcaaagttaccagaaatctttgtggaattttcactgccaaatttaaatttgggaatgtccgggtacaacatattgtcaccacaatccggagggccgccaaaatcgcagacggctatttgcatcctttcagtgtgacttttcaagtgggcttggagactcatgagaaaatgcagtatctttctcaccttccaagtccccctccaagtgcttatcaagctaggacaattcagctgatgtagactttcatacgatttttaaatgctaaaactctagaacaattaaatggctggtttcctgcacaaataaatgcagacttgtctcttttgcagcagtggttaaagcacattcctagagatgtttttcattacacttcactataacattggaattccgtaaccacattattactcaagaaatatatattatacctcctagggaatctaatttgaaatatgaaaagtttaacatcagctgtcattatgtctctctttctgctcattaacaacaacaaaaaaaaaaacccaaaatttaaaaacaaagccccagccactgctttagcttttgtgtaccaatcacattatctcctgctgcctttgttttgcctccttcatcaagcagttgatttaaggattggattttctggattttctttgggaagaaagaaatgaaggaagagagggagggtggggaaggagggagtgagaaagggagaaaaagaaaaaaatatgaaaaatgttattcatataatgtgtacaaagtaaattaaaaatatatagatactctactttgaataattctaatatatgagaagt

SEQ ID NO: 2 - RNA, 23 nt, Homo sapiens
  misc_feature 1..23: note = Description of sequence: Description: ZPI mRNA target sequences: starting position on NM_016186.3: 991
  source 1..23: mol_type = mRNA
tttgccttcatccacaaggattt

SEQ ID NO: 3 - RNA, 23 nt, Homo sapiens
  misc_feature 1..23: note = Description of sequence: Description: ZPI mRNA target sequences: starting position on NM_016186.3: 756
  source 1..23: mol_type = mRNA
gctgcgaaagatctccatgaggc

SEQ ID NO: 4 - RNA, 23 nt, Homo sapiens
  misc_feature 1..23: note = Description of sequence: Description: ZPI mRNA target sequences: starting position on NM_016186.3: 1390
  source 1..23: mol_type = mRNA
atgctggtggtcctcatggagaa

SEQ ID NO: 5 - RNA, 23 nt, Homo sapiens
  misc_feature 1..23: note = Description of sequence: Description: ZPI mRNA target sequences: starting position on NM_016186.3: 757
  source 1..23: mol_type = mRNA
ctgcgaaagatctccatgaggca

SEQ ID NO: 6 - RNA, 23 nt, Homo sapiens
  misc_feature 1..23: note = Description of sequence: Description: ZPI mRNA target sequences: starting position on NM_016186.3: 1531
  source 1..23: mol_type = mRNA
aagtatgagatgcatgagctgct

SEQ ID NO: 7 - RNA, 23 nt, Homo sapiens
  misc_feature 1..23: note = Description of sequence: Description: ZPI mRNA target sequences: starting position on NM_016186.3: 1156
  source 1..23: mol_type = mRNA
ctgtttgatgagattaatcctga

SEQ ID NO: 8 - RNA, 23 nt, Homo sapiens
  misc_feature 1..23: note = Description of sequence: Description: ZPI mRNA target sequences: starting position on NM_016186.3: 1162
  source 1..23: mol_type = mRNA
gatgagattaatcctgaaaccaa

SEQ ID NO: 9 - RNA, 23 nt, Homo sapiens
  misc_feature 1..23: note = Description of sequence: Description: ZPI mRNA target sequences: starting position on NM_016186.3: 1159
  source 1..23: mol_type = mRNA
tttgatgagattaatcctgaaac

SEQ ID NO: 10 - RNA, 23 nt, Homo sapiens
  misc_feature 1..23: note = Description of sequence: Description: ZPI mRNA target sequences: starting position on NM_016186.3: 1161
  source 1..23: mol_type = mRNA
tgatgagattaatcctgaaacca

SEQ ID NO: 11 - RNA, 23 nt, Homo sapiens
  misc_feature 1..23: note = Description of sequence: Description: ZPI mRNA target sequences: starting position on NM_016186.3: 1160
  source 1..23: mol_type = mRNA
ttgatgagattaatcctgaaacc

SEQ ID NO: 12 - RNA, 23 nt, Homo sapiens
  misc_feature 1..23: note = Description of sequence: Description: ZPI mRNA target sequences: starting position on NM_016186.3: 1154
  source 1..23: mol_type = mRNA
aactgtttgatgagattaatcct

SEQ ID NO: 13 - RNA, 23 nt, Homo sapiens
  misc_feature 1..23: note = Description of sequence: Description: ZPI mRNA target sequences: starting position on NM_016186.3: 988
  source 1..23: mol_type = mRNA
agttttgccttcatccacaagga

SEQ ID NO: 14 - RNA, 23 nt, Homo sapiens
  misc_feature 1..23: note = Description of sequence: Description: ZPI mRNA target sequences: starting position on NM_016186.3: 758
  source 1..23: mol_type = mRNA
tgcgaaagatctccatgaggcac

SEQ ID NO: 15 - RNA, 23 nt, Homo sapiens
  misc_feature 1..23: note = Description of sequence: Description: ZPI mRNA target sequences: starting position on NM_016186.3: 1389
  source 1..23: mol_type = mRNA
catgctggtggtcctcatggaga

SEQ ID NO: 16 - RNA, 23 nt, Homo sapiens
  misc_feature 1..23: note = Description of sequence: Description: ZPI mRNA target sequences: starting position on NM_016186.3: 993
  source 1..23: mol_type = mRNA
tgccttcatccacaaggattttg

SEQ ID NO: 17 - RNA, 23 nt, Homo sapiens
  misc_feature 1..23: note = Description of sequence: Description: ZPI mRNA target sequences: starting position on NM_016186.3: 759
  source 1..23: mol_type = mRNA
gcgaaagatctccatgaggcacg

SEQ ID NO: 18 - RNA, 23 nt, Homo sapiens
  misc_feature 1..23: note = Description of sequence: Description: ZPI mRNA target sequences: starting position on NM_016186.3: 995
  source 1..23: mol_type = mRNA
ccttcatccacaaggattttgat

SEQ ID NO: 19 - RNA, 23 nt, Homo sapiens
  misc_feature 1..23: note = Description of sequence: Description: ZPI mRNA target sequences: starting position on NM_016186.3: 1157
  source 1..23: mol_type = mRNA
tgtttgatgagattaatcctgaa

SEQ ID NO: 20 - RNA, 23 nt, Homo sapiens
  misc_feature 1..23: note = Description of sequence: Description: ZPI mRNA target sequences: starting position on NM_016186.3: 990
  source 1..23: mol_type = mRNA
ttttgccttcatccacaaggatt

SEQ ID NO: 21 - RNA, 23 nt, Homo sapiens
  misc_feature 1..23: note = Description of sequence: Description: ZPI mRNA target sequences: starting position on NM_016186.3: 763
  source 1..23: mol_type = mRNA
aagatctccatgaggcacgatgg

SEQ ID NO: 22 - RNA, 23 nt, Homo sapiens
  misc_feature 1..23: note = Description of sequence: Description: ZPI mRNA target sequences: starting position on NM_016186.3: 1387
  source 1..23: mol_type = mRNA
accatgctggtggtcctcatgga

SEQ ID NO: 23 - RNA, 23 nt, Homo sapiens
  misc_feature 1..23: note = Description of sequence: Description: ZPI mRNA target sequences: starting position on NM_016186.3: 989
  source 1..23: mol_type = mRNA
gttttgccttcatccacaaggat

SEQ ID NO: 24 - RNA, 23 nt, Homo sapiens
  misc_feature 1..23: note = Description of sequence: Description: ZPI mRNA target sequences: starting position on NM_016186.3: 992
  source 1..23: mol_type = mRNA
ttgccttcatccacaaggatttt

SEQ ID NO: 25 - RNA, 23 nt, Homo sapiens
  misc_feature 1..23: note = Description of sequence: Description: ZPI mRNA target sequences: starting position on NM_016186.3: 1370
  source 1..23: mol_type = mRNA
cctaccaaggaaatgccaccatg

SEQ ID NO: 26 - RNA, 23 nt, Homo sapiens
  misc_feature 1..23: note = Description of sequence: Description: ZPI mRNA target sequences: starting position on NM_016186.3: 1158
  source 1..23: mol_type = mRNA
gtttgatgagattaatcctgaaa

SEQ ID NO: 27 - RNA, 23 nt, Homo sapiens
  misc_feature 1..23: note = Description of sequence: Description: ZPI mRNA target sequences: starting position on NM_016186.3: 994
  source 1..23: mol_type = mRNA
gccttcatccacaaggattttga

SEQ ID NO: 28 - RNA, 23 nt, Homo sapiens
  misc_feature 1..23: note = Description of sequence: Description: ZPI mRNA target sequences: starting position on NM_016186.3: 760
  source 1..23: mol_type = mRNA
cgaaagatctccatgaggcacga

SEQ ID NO: 29 - RNA, 23 nt, Homo sapiens
  misc_feature 1..23: note = Description of sequence: Description: ZPI mRNA target sequences: starting position on NM_016186.3: 1155
  source 1..23: mol_type = mRNA
actgtttgatgagattaatcctg

SEQ ID NO: 30 - RNA, 23 nt, Homo sapiens
  misc_feature 1..23: note = Description of sequence: Description: ZPI mRNA target sequences: starting position on NM_016186.3: 1388
  source 1..23: mol_type = mRNA
ccatgctggtggtcctcatggag

SEQ ID NO: 31 - RNA, 23 nt, Homo sapiens
  misc_feature 1..23: note = Description of sequence: Description: ZPI mRNA target sequences: starting position on NM_016186.3: 987
  source 1..23: mol_type = mRNA
gagttttgccttcatccacaagg

SEQ ID NO: 32 - RNA, 23 nt, Homo sapiens
  misc_feature 1..23: note = Description of sequence: Description: ZPI mRNA target sequences: starting position on NM_016186.3: 1383
  source 1..23: mol_type = mRNA
tgccaccatgctggtggtcctca

SEQ ID NO: 33 - RNA, 23 nt, Homo sapiens
  misc_feature 1..23: note = Description of sequence: Description: ZPI mRNA target sequences: starting position on NM_016186.3: 1384
  source 1..23: mol_type = mRNA
gccaccatgctggtggtcctcat

SEQ ID NO: 34 - RNA, 23 nt, Homo sapiens
  misc_feature 1..23: note = Description of sequence: Description: ZPI mRNA target sequences: starting position on NM_016186.3: 761
  source 1..23: mol_type = mRNA
gaaagatctccatgaggcacgat

SEQ ID NO: 35 - RNA, 23 nt, Homo sapiens
  misc_feature 1..23: note = Description of sequence: Description: ZPI mRNA target sequences: starting position on NM_016186.3: 986
  source 1..23: mol_type = mRNA
ggagttttgccttcatccacaag

SEQ ID NO: 36 - RNA, 23 nt, Homo sapiens
  misc_feature 1..23: note = Description of sequence: Description: ZPI mRNA target sequences: starting position on NM_016186.3: 1385
  source 1..23: mol_type = mRNA
ccaccatgctggtggtcctcatg

SEQ ID NO: 37 - RNA, 23 nt, Homo sapiens
  misc_feature 1..23: note = Description of sequence: Description: ZPI mRNA target sequences: starting position on NM_016186.3: 762
  source 1..23: mol_type = mRNA
aaagatctccatgaggcacgatg

SEQ ID NO: 38 - RNA, 23 nt, Homo sapiens
  misc_feature 1..23: note = Description of sequence: Description: ZPI mRNA target sequences: starting position on NM_016186.3: 1386
  source 1..23: mol_type = mRNA
caccatgctggtggtcctcatgg

SEQ ID NO: 39 - RNA, 23 nt, Homo sapiens
  misc_feature 1..23: note = Description of sequence: Description: ZPI mRNA target sequences: starting position on NM_016186.3: 1321
  source 1..23: mol_type = mRNA
tttgcctccacctttgacaagaa

SEQ ID NO: 40 - RNA, 23 nt, Homo sapiens
  misc_feature 1..23: note = Description of sequence: Description: ZPI mRNA target sequences: starting position on NM_016186.3: 1323
  source 1..23: mol_type = mRNA
tgcctccacctttgacaagaatt

SEQ ID NO: 41 - RNA, 23 nt, Homo sapiens
  misc_feature 1..23: note = Description of sequence: Description: ZPI mRNA target sequences: starting position on NM_016186.3: 1285
  source 1..23: mol_type = mRNA
accattaaggtgcccatgatgta

SEQ ID NO: 42 - RNA, 23 nt, Homo sapiens
  misc_feature 1..23: note = Description of sequence: Description: ZPI mRNA target sequences: starting position on NM_016186.3: 1364
  source 1..23: mol_type = mRNA
aactgccctaccaaggaaatgcc

SEQ ID NO: 43 - RNA, 23 nt, Homo sapiens
  misc_feature 1..23: note = Description of sequence: Description: ZPI mRNA target sequences: starting position on NM_016186.3: 1360
  source 1..23: mol_type = mRNA
ctcaaactgccctaccaaggaaa

SEQ ID NO: 44 - RNA, 23 nt, Homo sapiens
  misc_feature 1..23: note = Description of sequence: Description: ZPI mRNA target sequences: starting position on NM_016186.3: 1359
  source 1..23: mol_type = mRNA
cctcaaactgccctaccaaggaa

SEQ ID NO: 45 - RNA, 23 nt, Homo sapiens
  misc_feature 1..23: note = Description of sequence: Description: ZPI mRNA target sequences: starting position on NM_016186.3: 1324
  source 1..23: mol_type = mRNA
gcctccacctttgacaagaattt

SEQ ID NO: 46 - RNA, 23 nt, Homo sapiens
  misc_feature 1..23: note = Description of sequence: Description: ZPI mRNA target sequences: starting position on NM_016186.3: 1255
  source 1..23: mol_type = mRNA
gtcgacactttccacctggacaa

SEQ ID NO: 47 - RNA, 23 nt, Homo sapiens
  misc_feature 1..23: note = Description of sequence: Description: ZPI mRNA target sequences: starting position on NM_016186.3: 1259
  source 1..23: mol_type = mRNA
acactttccacctggacaagtac

SEQ ID NO: 48 - RNA, 23 nt, Homo sapiens
  misc_feature 1..23: note = Description of sequence: Description: ZPI mRNA target sequences: starting position on NM_016186.3: 1361
  source 1..23: mol_type = mRNA
tcaaactgccctaccaaggaaat

SEQ ID NO: 49 - RNA, 23 nt, Homo sapiens
  misc_feature 1..23: note = Description of sequence: Description: ZPI mRNA target sequences: starting position on NM_016186.3: 1363
  source 1..23: mol_type = mRNA
aaactgccctaccaaggaaatgc

SEQ ID NO: 50 - RNA, 23 nt, Homo sapiens
  misc_feature 1..23: note = Description of sequence: Description: ZPI mRNA target sequences: starting position on NM_016186.3: 1258
  source 1..23: mol_type = mRNA
gacactttccacctggacaagta

SEQ ID NO: 51 - RNA, 23 nt, Homo sapiens
  misc_feature 1..23: note = Description of sequence: Description: ZPI mRNA target sequences: starting position on NM_016186.3: 1284
  source 1..23: mol_type = mRNA
gaccattaaggtgcccatgatgt

SEQ ID NO: 52 - RNA, 23 nt, Homo sapiens
  misc_feature 1..23: note = Description of sequence: Description: ZPI mRNA target sequences: starting position on NM_016186.3: 1320
  source 1..23: mol_type = mRNA
gtttgcctccacctttgacaaga

SEQ ID NO: 53 - RNA, 23 nt, Homo sapiens
  misc_feature 1..23: note = Description of sequence: Description: ZPI mRNA target sequences: starting position on NM_016186.3: 1261
  source 1..23: mol_type = mRNA
actttccacctggacaagtacaa

SEQ ID NO: 54 - RNA, 23 nt, Homo sapiens
  misc_feature 1..23: note = Description of sequence: Description: ZPI mRNA target sequences: starting position on NM_016186.3: 1356
  source 1..23: mol_type = mRNA
tgtcctcaaactgccctaccaag

SEQ ID NO: 55 - RNA, 23 nt, Homo sapiens
  misc_feature 1..23: note = Description of sequence: Description: ZPI mRNA target sequences: starting position on NM_016186.3: 1362
  source 1..23: mol_type = mRNA
caaactgccctaccaaggaaatg

SEQ ID NO: 56 - RNA, 23 nt, Homo sapiens
  misc_feature 1..23: note = Description of sequence: Description: ZPI mRNA target sequences: starting position on NM_016186.3: 1357
  source 1..23: mol_type = mRNA
gtcctcaaactgccctaccaagg

SEQ ID NO: 57 - RNA, 23 nt, Homo sapiens
  misc_feature 1..23: note = Description of sequence: Description: ZPI mRNA target sequences: starting position on NM_016186.3: 1355
  source 1..23: mol_type = mRNA
atgtcctcaaactgccctaccaa

SEQ ID NO: 58 - RNA, 23 nt, Homo sapiens
  misc_feature 1..23: note = Description of sequence: Description: ZPI mRNA target sequences: starting position on NM_016186.3: 1256
  source 1..23: mol_type = mRNA
tcgacactttccacctggacaag

SEQ ID NO: 59 - RNA, 23 nt, Homo sapiens
  misc_feature 1..23: note = Description of sequence: Description: ZPI mRNA target sequences: starting position on NM_016186.3: 1319
  source 1..23: mol_type = mRNA
agtttgcctccacctttgacaag

SEQ ID NO: 60 - RNA, 23 nt, Homo sapiens
  misc_feature 1..23: note = Description of sequence: Description: ZPI mRNA target sequences: starting position on NM_016186.3: 1257
  source 1..23: mol_type = mRNA
cgacactttccacctggacaagt

SEQ ID NO: 61 - RNA, 23 nt, Homo sapiens
  misc_feature 1..23: note = Description of sequence: Description: ZPI mRNA target sequences: starting position on NM_016186.3: 1262
  source 1..23: mol_type = mRNA
ctttccacctggacaagtacaag

SEQ ID NO: 62 - RNA, 23 nt, Homo sapiens
  misc_feature 1..23: note = Description of sequence: Description: ZPI mRNA target sequences: starting position on NM_016186.3: 1260
  source 1..23: mol_type = mRNA
cactttccacctggacaagtaca

SEQ ID NO: 63 - RNA, 23 nt, Homo sapiens
  misc_feature 1..23: note = Description of sequence: Description: ZPI mRNA target sequences: starting position on NM_016186.3: 1358
  source 1..23: mol_type = mRNA
tcctcaaactgccctaccaagga

SEQ ID NO: 64 - RNA, 23 nt, Homo sapiens
  misc_feature 1..23: note = Description of sequence: Description: ZPI mRNA target sequences: starting position on NM_016186.3: 1198
  source 1..23: mol_type = mRNA
gattacatcttgttcaaagggaa

SEQ ID NO: 65 - RNA, 23 nt, Homo sapiens
  misc_feature 1..23: note = Description of sequence: Description: ZPI mRNA target sequences: starting position on NM_016186.3: 1381
  source 1..23: mol_type = mRNA
aatgccaccatgctggtggtcct

SEQ ID NO: 66 - RNA, 23 nt, Homo sapiens
  misc_feature 1..23: note = Description of sequence: Description: ZPI mRNA target sequences: starting position on NM_016186.3: 1038
  source 1..23: mol_type = mRNA
tttatccaagaggtattttgata

SEQ ID NO: 67 - RNA, 23 nt, Homo sapiens
  misc_feature 1..23: note = Description of sequence: Description: ZPI mRNA target sequences: starting position on NM_016186.3: 1378
  source 1..23: mol_type = mRNA
ggaaatgccaccatgctggtggt

SEQ ID NO: 68 - RNA, 23 nt, Homo sapiens
  misc_feature 1..23: note = Description of sequence: Description: ZPI mRNA target sequences: starting position on NM_016186.3: 1197
  source 1..23: mol_type = mRNA
ggattacatcttgttcaaaggga

SEQ ID NO: 69 - RNA, 23 nt, Homo sapiens
  misc_feature 1..23: note = Description of sequence: Description: ZPI mRNA target sequences: starting position on NM_016186.3: 766
  source 1..23: mol_type = mRNA
atctccatgaggcacgatggcaa

SEQ ID NO: 70 - RNA, 23 nt, Homo sapiens
  misc_feature 1..23: note = Description of sequence: Description: ZPI mRNA target sequences: starting position on NM_016186.3: 1721
  source 1..23: mol_type = mRNA
attccatgcctcctgtcatcaaa

SEQ ID NO: 71 - RNA, 23 nt, Homo sapiens
  misc_feature 1..23: note = Description of sequence: Description: ZPI mRNA target sequences: starting position on NM_016186.3: 1719
  source 1..23: mol_type = mRNA
ttattccatgcctcctgtcatca

SEQ ID NO: 72 - RNA, 23 nt, Homo sapiens
  misc_feature 1..23: note = Description of sequence: Description: ZPI mRNA target sequences: starting position on NM_016186.3: 1373
  source 1..23: mol_type = mRNA
accaaggaaatgccaccatgctg

SEQ ID NO: 73 - RNA, 23 nt, Homo sapiens
  misc_feature 1..23: note = Description of sequence: Description: ZPI mRNA target sequences: starting position on NM_016186.3: 1392
  source 1..23: mol_type = mRNA
gctggtggtcctcatggagaaaa

SEQ ID NO: 74 - RNA, 23 nt, Homo sapiens
  misc_feature 1..23: note = Description of sequence: Description: ZPI mRNA target sequences: starting position on NM_016186.3: 1202
  source 1..23: mol_type = mRNA
acatcttgttcaaagggaaatgg

SEQ ID NO: 75 - RNA, 23 nt, Homo sapiens
  misc_feature 1..23: note = Description of sequence: Description: ZPI mRNA target sequences: starting position on NM_016186.3: 1374
  source 1..23: mol_type = mRNA
ccaaggaaatgccaccatgctgg

SEQ ID NO: 76 - RNA, 23 nt, Homo sapiens
  misc_feature 1..23: note = Description of sequence: Description: ZPI mRNA target sequences: starting position on NM_016186.3: 1322
  source 1..23: mol_type = mRNA
ttgcctccacctttgacaagaat

SEQ ID NO: 77 - RNA, 23 nt, Homo sapiens
  misc_feature 1..23: note = Description of sequence: Description: ZPI mRNA target sequences: starting position on NM_016186.3: 985
  source 1..23: mol_type = mRNA
gggagttttgccttcatccacaa

SEQ ID NO: 78 - RNA, 23 nt, Homo sapiens
  misc_feature 1..23: note = Description of sequence: Description: ZPI mRNA target sequences: starting position on NM_016186.3: 754
  source 1..23: mol_type = mRNA
ctgctgcgaaagatctccatgag

SEQ ID NO: 79 - RNA, 23 nt, Homo sapiens
  misc_feature 1..23: note = Description of sequence: Description: ZPI mRNA target sequences: starting position on NM_016186.3: 1317
  source 1..23: mol_type = mRNA
caagtttgcctccacctttgaca

SEQ ID NO: 80 - RNA, 23 nt, Homo sapiens
  misc_feature 1..23: note = Description of sequence: Description: ZPI mRNA target sequences: starting position on NM_016186.3: 1318
  source 1..23: mol_type = mRNA
aagtttgcctccacctttgacaa

SEQ ID NO: 81 - RNA, 23 nt, Homo sapiens
  misc_feature 1..23: note = Description of sequence: Description: ZPI mRNA target sequences: starting position on NM_016186.3: 1201
  source 1..23: mol_type = mRNA
tacatcttgttcaaagggaaatg

SEQ ID NO: 82 - RNA, 23 nt, Homo sapiens
  misc_feature 1..23: note = Description of sequence: Description: ZPI mRNA target sequences: starting position on NM_016186.3: 984
  source 1..23: mol_type = mRNA
ggggagttttgccttcatccaca

SEQ ID NO: 83 - RNA, 23 nt, Homo sapiens
  misc_feature 1..23: note = Description of sequence: Description: ZPI mRNA target sequences: starting position on NM_016186.3: 755
  source 1..23: mol_type = mRNA
tgctgcgaaagatctccatgagg

SEQ ID NO: 84 - RNA, 23 nt, Homo sapiens
  misc_feature 1..23: note = Description of sequence: Description: ZPI mRNA target sequences: starting position on NM_016186.3: 1722
  source 1..23: mol_type = mRNA
ttccatgcctcctgtcatcaaag

SEQ ID NO: 85 - RNA, 23 nt, Homo sapiens
  misc_feature 1..23: note = Description of sequence: Description: ZPI mRNA target sequences: starting position on NM_016186.3: 1794
  source 1..23: mol_type = mRNA
tctgtttctgggcagggtggtga

SEQ ID NO: 86 - RNA, 23 nt, Homo sapiens
  misc_feature 1..23: note = Description of sequence: Description: ZPI mRNA target sequences: starting position on NM_016186.3: 750
  source 1..23: mol_type = mRNA
cagcctgctgcgaaagatctcca

SEQ ID NO: 87 - RNA, 23 nt, Homo sapiens
  misc_feature 1..23: note = Description of sequence: Description: ZPI mRNA target sequences: starting position on NM_016186.3: 1152
  source 1..23: mol_type = mRNA
caaactgtttgatgagattaatc

SEQ ID NO: 88 - RNA, 23 nt, Homo sapiens
  misc_feature 1..23: note = Description of sequence: Description: ZPI mRNA target sequences: starting position on NM_016186.3: 1724
  source 1..23: mol_type = mRNA
ccatgcctcctgtcatcaaagtg

SEQ ID NO: 89 - RNA, 23 nt, Homo sapiens
  misc_feature 1..23: note = Description of sequence: Description: ZPI mRNA target sequences: starting position on NM_016186.3: 1530
  source 1..23: mol_type = mRNA
gaagtatgagatgcatgagctgc

SEQ ID NO: 90 - RNA, 23 nt, Homo sapiens
  misc_feature 1..23: note = Description of sequence: Description: ZPI mRNA target sequences: starting position on NM_016186.3: 1529
  source 1..23: mol_type = mRNA
agaagtatgagatgcatgagctg

SEQ ID NO: 91 - RNA, 23 nt, Homo sapiens
  misc_feature 1..23: note = Description of sequence: Description: ZPI mRNA target sequences: starting position on NM_016186.3: 1354
  source 1..23: mol_type = mRNA
catgtcctcaaactgccctacca

SEQ ID NO: 92 - RNA, 23 nt, Homo sapiens
  misc_feature 1..23: note = Description of sequence: Description: ZPI mRNA target sequences: starting position on NM_016186.3: 1153
  source 1..23: mol_type = mRNA
aaactgtttgatgagattaatcc

SEQ ID NO: 93 - RNA, 23 nt, Homo sapiens
  misc_feature 1..23: note = Description of sequence: Description: ZPI mRNA target sequences: starting position on NM_016186.3: 1282
  source 1..23: mol_type = mRNA
aagaccattaaggtgcccatgat

SEQ ID NO: 94 - RNA, 23 nt, Homo sapiens
  misc_feature 1..23: note = Description of sequence: Description: ZPI mRNA target sequences: starting position on NM_016186.3: 1283
  source 1..23: mol_type = mRNA
agaccattaaggtgcccatgatg

SEQ ID NO: 95 - RNA, 23 nt, Homo sapiens
  misc_feature 1..23: note = Description of sequence: Description: ZPI mRNA target sequences: starting position on NM_016186.3: 1795
  source 1..23: mol_type = mRNA
ctgtttctgggcagggtggtgaa

SEQ ID NO: 96 - RNA, 23 nt, Homo sapiens
  misc_feature 1..23: note = Description of sequence: Description: ZPI mRNA target sequences: starting position on NM_016186.3: 1791
  source 1..23: mol_type = mRNA
gcttctgtttctgggcagggtgg

SEQ ID NO: 97 - RNA, 23 nt, Homo sapiens
  misc_feature 1..23: note = Description of sequence: Description: ZPI mRNA target sequences: starting position on NM_016186.3: 1500
  source 1..23: mol_type = mRNA
agttttctttccgaagttcaagc

SEQ ID NO: 98 - RNA, 23 nt, Homo sapiens
  misc_feature 1..23: note = Description of sequence: Description: ZPI mRNA target sequences: starting position on NM_016186.3: 1501
  source 1..23: mol_type = mRNA
gttttctttccgaagttcaagct

SEQ ID NO: 99 - RNA, 23 nt, Homo sapiens
  misc_feature 1..23: note = Description of sequence: Description: ZPI mRNA target sequences: starting position on NM_016186.3: 1792
  source 1..23: mol_type = mRNA
cttctgtttctgggcagggtggt

SEQ ID NO: 100 - RNA, 23 nt, Homo sapiens
  misc_feature 1..23: note = Description of sequence: Description: ZPI mRNA target sequences: starting position on NM_016186.3: 1353
  source 1..23: mol_type = mRNA
tcatgtcctcaaactgccctacc

SEQ ID NO: 101 - RNA, 23 nt, Homo sapiens
  misc_feature 1..23: note = Description of sequence: Description: ZPI mRNA target sequences: starting position on NM_016186.3: 1254
  source 1..23: mol_type = mRNA
agtcgacactttccacctggaca

SEQ ID NO: 102 - RNA, 19 nt, Homo sapiens
  misc_feature 1..19: note = Description of sequence: Description: ZPI mRNA target sequences: starting position on NM_016186.3: 995
  source 1..19: mol_type = mRNA
ccttcatccacaaggattt

SEQ ID NO: 103 - RNA, 19 nt, Homo sapiens
  misc_feature 1..19: note = Description of sequence: Description: ZPI mRNA target sequences: starting position on NM_016186.3: 760
  source 1..19: mol_type = mRNA
cgaaagatctccatgaggc

SEQ ID NO: 104 - RNA, 19 nt, Homo sapiens
  misc_feature 1..19: note = Description of sequence: Description: ZPI mRNA target sequences: starting position on NM_016186.3: 1394
  source 1..19: mol_type = mRNA
tggtggtcctcatggagaa

SEQ ID NO: 105 - RNA, 19 nt, Homo sapiens
  misc_feature 1..19: note = Description of sequence: Description: ZPI mRNA target sequences: starting position on NM_016186.3: 761
  source 1..19: mol_type = mRNA
gaaagatctccatgaggca

SEQ ID NO: 106 - RNA, 19 nt, Homo sapiens
  misc_feature 1..19: note = Description of sequence: Description: ZPI mRNA target sequences: starting position on NM_016186.3: 1535
  source 1..19: mol_type = mRNA
atgagatgcatgagctgct

SEQ ID NO: 107 - RNA, 19 nt, Homo sapiens
  misc_feature 1..19: note = Description of sequence: Description: ZPI mRNA target sequences: starting position on NM_016186.3: 1160
  source 1..19: mol_type = mRNA
ttgatgagattaatcctga

SEQ ID NO: 108 - RNA, 19 nt, Homo sapiens
  misc_feature 1..19: note = Description of sequence: Description: ZPI mRNA target sequences: starting position on NM_016186.3: 1166
  source 1..19: mol_type = mRNA
agattaatcctgaaaccaa

SEQ ID NO: 109 - RNA, 19 nt, Homo sapiens
  misc_feature 1..19: note = Description of sequence: Description: ZPI mRNA target sequences: starting position on NM_016186.3: 1163
  source 1..19: mol_type = mRNA
atgagattaatcctgaaac

SEQ ID NO: 110 - RNA, 19 nt, Homo sapiens
  misc_feature 1..19: note = Description of sequence: Description: ZPI mRNA target sequences: starting position on NM_016186.3: 1165
  source 1..19: mol_type = mRNA
gagattaatcctgaaacca

SEQ ID NO: 111 - RNA, 19 nt, Homo sapiens
  misc_feature 1..19: note = Description of sequence: Description: ZPI mRNA target sequences: starting position on NM_016186.3: 1164
  source 1..19: mol_type = mRNA
tgagattaatcctgaaacc

SEQ ID NO: 112 - RNA, 19 nt, Homo sapiens
  misc_feature 1..19: note = Description of sequence: Description: ZPI mRNA target sequences: starting position on NM_016186.3: 1158
  source 1..19: mol_type = mRNA
gtttgatgagattaatcct

SEQ ID NO: 113 - RNA, 19 nt, Homo sapiens
  misc_feature 1..19: note = Description of sequence: Description: ZPI mRNA target sequences: starting position on NM_016186.3: 992
  source 1..19: mol_type = mRNA
ttgccttcatccacaagga

SEQ ID NO: 114 - RNA, 19 nt, Homo sapiens
  misc_feature 1..19: note = Description of sequence: Description: ZPI mRNA target sequences: starting position on NM_016186.3: 762
  source 1..19: mol_type = mRNA
aaagatctccatgaggcac

SEQ ID NO: 115 - RNA, 19 nt, Homo sapiens
  misc_feature 1..19: note = Description of sequence: Description: ZPI mRNA target sequences: starting position on NM_016186.3: 1393
  source 1..19: mol_type = mRNA
ctggtggtcctcatggaga

SEQ ID NO: 116 - RNA, 19 nt, Homo sapiens
  misc_feature 1..19: note = Description of sequence: Description: ZPI mRNA target sequences: starting position on NM_016186.3: 997
  source 1..19: mol_type = mRNA
ttcatccacaaggattttg

SEQ ID NO: 117 - RNA, 19 nt, Homo sapiens
  misc_feature 1..19: note = Description of sequence: Description: ZPI mRNA target sequences: starting position on NM_016186.3: 763
  source 1..19: mol_type = mRNA
aagatctccatgaggcacg

SEQ ID NO: 118 - RNA, 19 nt, Homo sapiens
  misc_feature 1..19: note = Description of sequence: Description: ZPI mRNA target sequences: starting position on NM_016186.3: 999
  source 1..19: mol_type = mRNA
catccacaaggattttgat

SEQ ID NO: 119 - RNA, 19 nt, Homo sapiens
  misc_feature 1..19: note = Description of sequence: Description: ZPI mRNA target sequences: starting position on NM_016186.3: 1161
  source 1..19: mol_type = mRNA
tgatgagattaatcctgaa

SEQ ID NO: 120 - RNA, 19 nt, Homo sapiens
  misc_feature 1..19: note = Description of sequence: Description: ZPI mRNA target sequences: starting position on NM_016186.3: 994
  source 1..19: mol_type = mRNA
gccttcatccacaaggatt

SEQ ID NO: 121 - RNA, 19 nt, Homo sapiens
  misc_feature 1..19: note = Description of sequence: Description: ZPI mRNA target sequences: starting position on NM_016186.3: 767
  source 1..19: mol_type = mRNA
tctccatgaggcacgatgg

SEQ ID NO: 122 - RNA, 23 nt, synthetic construct
  misc_feature 1..23: note = Description of sequence: Description: ZPI siRNA antisense strand (unmodified); corresponding positions on NM_016186.3: 991-1012
  source 1..23: mol_type = other RNA
aaatccttgtggatgaaggcaaa

SEQ ID NO: 123 - RNA, 23 nt, synthetic construct
  misc_feature 1..23: note = Description of sequence: Description: ZPI siRNA antisense strand (unmodified); corresponding positions on NM_016186.3: 756-777
  source 1..23: mol_type = other RNA
gcctcatggagatctttcgcagc

SEQ ID NO: 124 - RNA, 23 nt, synthetic construct
  misc_feature 1..23: note = Description of sequence: Description: ZPI siRNA antisense strand (unmodified); corresponding positions on NM_016186.3: 1390-1411
  source 1..23: mol_type = other RNA
ttctccatgaggaccaccagcat

SEQ ID NO: 125 - RNA, 23 nt, synthetic construct
  misc_feature 1..23: note = Description of sequence: Description: ZPI siRNA antisense strand (unmodified); corresponding positions on NM_016186.3: 757-778
  source 1..23: mol_type = other RNA
tgcctcatggagatctttcgcag

SEQ ID NO: 126 - RNA, 23 nt, synthetic construct
  misc_feature 1..23: note = Description of sequence: Description: ZPI siRNA antisense strand (unmodified); corresponding positions on NM_016186.3: 1531-1552
  source 1..23: mol_type = other RNA
agcagctcatgcatctcatactt

SEQ ID NO: 127 - RNA, 23 nt, synthetic construct
  misc_feature 1..23: note = Description of sequence: Description: ZPI siRNA antisense strand (unmodified); corresponding positions on NM_016186.3: 1156-1177
  source 1..23: mol_type = other RNA
tcaggattaatctcatcaaacag

SEQ ID NO: 128 - RNA, 23 nt, synthetic construct
  misc_feature 1..23: note = Description of sequence: Description: ZPI siRNA antisense strand (unmodified); corresponding positions on NM_016186.3: 1162-1183
  source 1..23: mol_type = other RNA
ttggtttcaggattaatctcatc

SEQ ID NO: 129 - RNA, 23 nt, synthetic construct
  misc_feature 1..23: note = Description of sequence: Description: ZPI siRNA antisense strand (unmodified); corresponding positions on NM_016186.3: 1159-1180
  source 1..23: mol_type = other RNA
gtttcaggattaatctcatcaaa

SEQ ID NO: 130 - RNA, 23 nt, synthetic construct
  misc_feature 1..23: note = Description of sequence: Description: ZPI siRNA antisense strand (unmodified); corresponding positions on NM_016186.3: 1161-1182
  source 1..23: mol_type = other RNA
tggtttcaggattaatctcatca

SEQ ID NO: 131 - RNA, 23 nt, synthetic construct
  misc_feature 1..23: note = Description of sequence: Description: ZPI siRNA antisense strand (unmodified); corresponding positions on NM_016186.3: 1160-1181
  source 1..23: mol_type = other RNA
ggtttcaggattaatctcatcaa

SEQ ID NO: 132 - RNA, 23 nt, synthetic construct
  misc_feature 1..23: note = Description of sequence: Description: ZPI siRNA antisense strand (unmodified); corresponding positions on NM_016186.3: 1154-1175
  source 1..23: mol_type = other RNA
aggattaatctcatcaaacagtt

SEQ ID NO: 133 - RNA, 23 nt, synthetic construct
  misc_feature 1..23: note = Description of sequence: Description: ZPI siRNA antisense strand (unmodified); corresponding positions on NM_016186.3: 988-1009
  source 1..23: mol_type = other RNA
tccttgtggatgaaggcaaaact

SEQ ID NO: 134 - RNA, 23 nt, synthetic construct
  misc_feature 1..23: note = Description of sequence: Description: ZPI siRNA antisense strand (unmodified); corresponding positions on NM_016186.3: 758-779
  source 1..23: mol_type = other RNA
gtgcctcatggagatctttcgca

SEQ ID NO: 135 - RNA, 23 nt, synthetic construct
  misc_feature 1..23: note = Description of sequence: Description: ZPI siRNA antisense strand (unmodified); corresponding positions on NM_016186.3: 1389-1410
  source 1..23: mol_type = other RNA
tctccatgaggaccaccagcatg

SEQ ID NO: 136 - RNA, 23 nt, synthetic construct
  misc_feature 1..23: note = Description of sequence: Description: ZPI siRNA antisense strand (unmodified); corresponding positions on NM_016186.3: 993-1014
  source 1..23: mol_type = other RNA
caaaatccttgtggatgaaggca

SEQ ID NO: 137 - RNA, 23 nt, synthetic construct
  misc_feature 1..23: note = Description of sequence: Description: ZPI siRNA antisense strand (unmodified); corresponding positions on NM_016186.3: 759-780
  source 1..23: mol_type = other RNA
cgtgcctcatggagatctttcgc

SEQ ID NO: 138 - RNA, 23 nt, synthetic construct
  misc_feature 1..23: note = Description of sequence: Description: ZPI siRNA antisense strand (unmodified); corresponding positions on NM_016186.3: 995-1016
  source 1..23: mol_type = other RNA
atcaaaatccttgtggatgaagg

SEQ ID NO: 139 - RNA, 23 nt, synthetic construct
  misc_feature 1..23: note = Description of sequence: Description: ZPI siRNA antisense strand (unmodified); corresponding positions on NM_016186.3: 1157-1178
  source 1..23: mol_type = other RNA
ttcaggattaatctcatcaaaca

SEQ ID NO: 140 - RNA, 23 nt, synthetic construct
  misc_feature 1..23: note = Description of sequence: Description: ZPI siRNA antisense strand (unmodified); corresponding positions on NM_016186.3: 990-1011
  source 1..23: mol_type = other RNA
aatccttgtggatgaaggcaaaa

SEQ ID NO: 141 - RNA, 23 nt, synthetic construct
  misc_feature 1..23: note = Description of sequence: Description: ZPI siRNA antisense strand (unmodified); corresponding positions on NM_016186.3: 763-784
  source 1..23: mol_type = other RNA
ccatcgtgcctcatggagatctt

SEQ ID NO: 142 - RNA, 23 nt, synthetic construct
  misc_feature 1..23: note = Description of sequence: Description: ZPI siRNA antisense strand (unmodified); corresponding positions on NM_016186.3: 1387-1408
  source 1..23: mol_type = other RNA
tccatgaggaccaccagcatggt

SEQ ID NO: 143 - RNA, 23 nt, synthetic construct
  misc_feature 1..23: note = Description of sequence: Description: ZPI siRNA antisense strand (unmodified); corresponding positions on NM_016186.3: 989-1010
  source 1..23: mol_type = other RNA
atccttgtggatgaaggcaaaac

SEQ ID NO: 144 - RNA, 23 nt, synthetic construct
  misc_feature 1..23: note = Description of sequence: Description: ZPI siRNA antisense strand (unmodified); corresponding positions on NM_016186.3: 992-1013
  source 1..23: mol_type = other RNA
aaaatccttgtggatgaaggcaa

SEQ ID NO: 145 - RNA, 23 nt, synthetic construct
  misc_feature 1..23: note = Description of sequence: Description: ZPI siRNA antisense strand (unmodified); corresponding positions on NM_016186.3: 1370-1391
  source 1..23: mol_type = other RNA
catggtggcatttccttggtagg

SEQ ID NO: 146 - RNA, 23 nt, synthetic construct
  misc_feature 1..23: note = Description of sequence: Description: ZPI siRNA antisense strand (unmodified); corresponding positions on NM_016186.3: 1158-1179
  source 1..23: mol_type = other RNA
tttcaggattaatctcatcaaac

SEQ ID NO: 147 - RNA, 23 nt, synthetic construct
  misc_feature 1..23: note = Description of sequence: Description: ZPI siRNA antisense strand (unmodified); corresponding positions on NM_016186.3: 994-1015
  source 1..23: mol_type = other RNA
tcaaaatccttgtggatgaaggc

SEQ ID NO: 148 - RNA, 23 nt, synthetic construct
  misc_feature 1..23: note = Description of sequence: Description: ZPI siRNA antisense strand (unmodified); corresponding positions on NM_016186.3: 760-781
  source 1..23: mol_type = other RNA
tcgtgcctcatggagatctttcg

SEQ ID NO: 149 - RNA, 23 nt, synthetic construct
  misc_feature 1..23: note = Description of sequence: Description: ZPI siRNA antisense strand (unmodified); corresponding positions on NM_016186.3: 1155-1176
  source 1..23: mol_type = other RNA
caggattaatctcatcaaacagt

SEQ ID NO: 150 - RNA, 23 nt, synthetic construct
  misc_feature 1..23: note = Description of sequence: Description: ZPI siRNA antisense strand (unmodified); corresponding positions on NM_016186.3: 1388-1409
  source 1..23: mol_type = other RNA
ctccatgaggaccaccagcatgg

SEQ ID NO: 151 - RNA, 23 nt, synthetic construct
  misc_feature 1..23: note = Description of sequence: Description: ZPI siRNA antisense strand (unmodified); corresponding positions on NM_016186.3: 987-1008
  source 1..23: mol_type = other RNA
ccttgtggatgaaggcaaaactc

SEQ ID NO: 152 - RNA, 23 nt, synthetic construct
  misc_feature 1..23: note = Description of sequence: Description: ZPI siRNA antisense strand (unmodified); corresponding positions on NM_016186.3: 1383-1404
  source 1..23: mol_type = other RNA
tgaggaccaccagcatggtggca

SEQ ID NO: 153 - RNA, 23 nt, synthetic construct
  misc_feature 1..23: note = Description of sequence: Description: ZPI siRNA antisense strand (unmodified); corresponding positions on NM_016186.3: 1384-1405
  source 1..23: mol_type = other RNA
atgaggaccaccagcatggtggc

SEQ ID NO: 154 - RNA, 23 nt, synthetic construct
  misc_feature 1..23: note = Description of sequence: Description: ZPI siRNA antisense strand (unmodified); corresponding positions on NM_016186.3: 761-782
  source 1..23: mol_type = other RNA
atcgtgcctcatggagatctttc

SEQ ID NO: 155 - RNA, 23 nt, synthetic construct
  misc_feature 1..23: note = Description of sequence: Description: ZPI siRNA antisense strand (unmodified); corresponding positions on NM_016186.3: 986-1007
  source 1..23: mol_type = other RNA
cttgtggatgaaggcaaaactcc

SEQ ID NO: 156 - RNA, 23 nt, synthetic construct
  misc_feature 1..23: note = Description of sequence: Description: ZPI siRNA antisense strand (unmodified); corresponding positions on NM_016186.3: 1385-1406
  source 1..23: mol_type = other RNA
catgaggaccaccagcatggtgg

SEQ ID NO: 157 - RNA, 23 nt, synthetic construct
  misc_feature 1..23: note = Description of sequence: Description: ZPI siRNA antisense strand (unmodified); corresponding positions on NM_016186.3: 762-783
  source 1..23: mol_type = other RNA
catcgtgcctcatggagatcttt

SEQ ID NO: 158 - RNA, 23 nt, synthetic construct
  misc_feature 1..23: note = Description of sequence: Description: ZPI siRNA antisense strand (unmodified); corresponding positions on NM_016186.3: 1386-1407
  source 1..23: mol_type = other RNA
ccatgaggaccaccagcatggtg

SEQ ID NO: 159 - RNA, 23 nt, synthetic construct
  misc_feature 1..23: note = Description of sequence: Description: ZPI siRNA antisense strand (unmodified); corresponding positions on NM_016186.3: 1321-1342
  source 1..23: mol_type = other RNA
ttcttgtcaaaggtggaggcaaa

SEQ ID NO: 160 - RNA, 23 nt, synthetic construct
  misc_feature 1..23: note = Description of sequence: Description: ZPI siRNA antisense strand (unmodified); corresponding positions on NM_016186.3: 1323-1344
  source 1..23: mol_type = other RNA
aattcttgtcaaaggtggaggca

SEQ ID NO: 161 - RNA, 23 nt, synthetic construct
  misc_feature 1..23: note = Description of sequence: Description: ZPI siRNA antisense strand (unmodified); corresponding positions on NM_016186.3: 1285-1306
  source 1..23: mol_type = other RNA
tacatcatgggcaccttaatggt

SEQ ID NO: 162 - RNA, 23 nt, synthetic construct
  misc_feature 1..23: note = Description of sequence: Description: ZPI siRNA antisense strand (unmodified); corresponding positions on NM_016186.3: 1364-1385
  source 1..23: mol_type = other RNA
ggcatttccttggtagggcagtt

SEQ ID NO: 163 - RNA, 23 nt, synthetic construct
  misc_feature 1..23: note = Description of sequence: Description: ZPI siRNA antisense strand (unmodified); corresponding positions on NM_016186.3: 1360-1381
  source 1..23: mol_type = other RNA
tttccttggtagggcagtttgag

SEQ ID NO: 164 - RNA, 23 nt, synthetic construct
  misc_feature 1..23: note = Description of sequence: Description: ZPI siRNA antisense strand (unmodified); corresponding positions on NM_016186.3: 1359-1380
  source 1..23: mol_type = other RNA
ttccttggtagggcagtttgagg

SEQ ID NO: 165 - RNA, 23 nt, synthetic construct
  misc_feature 1..23: note = Description of sequence: Description: ZPI siRNA antisense strand (unmodified); corresponding positions on NM_016186.3: 1324-1345
  source 1..23: mol_type = other RNA
aaattcttgtcaaaggtggaggc

SEQ ID NO: 166 - RNA, 23 nt, synthetic construct
  misc_feature 1..23: note = Description of sequence: Description: ZPI siRNA antisense strand (unmodified); corresponding positions on NM_016186.3: 1255-1276
  source 1..23: mol_type = other RNA
ttgtccaggtggaaagtgtcgac

SEQ ID NO: 167 - RNA, 23 nt, synthetic construct
  misc_feature 1..23: note = Description of sequence: Description: ZPI siRNA antisense strand (unmodified); corresponding positions on NM_016186.3: 1259-1280
  source 1..23: mol_type = other RNA
gtacttgtccaggtggaaagtgt

SEQ ID NO: 168 - RNA, 23 nt, synthetic construct
  misc_feature 1..23: note = Description of sequence: Description: ZPI siRNA antisense strand (unmodified); corresponding positions on NM_016186.3: 1361-1382
  source 1..23: mol_type = other RNA
atttccttggtagggcagtttga

SEQ ID NO: 169 - RNA, 23 nt, synthetic construct
  misc_feature 1..23: note = Description of sequence: Description: ZPI siRNA antisense strand (unmodified); corresponding positions on NM_016186.3: 1363-1384
  source 1..23: mol_type = other RNA
gcatttccttggtagggcagttt

SEQ ID NO: 170 - RNA, 23 nt, synthetic construct
  misc_feature 1..23: note = Description of sequence: Description: ZPI siRNA antisense strand (unmodified); corresponding positions on NM_016186.3: 1258-1279
  source 1..23: mol_type = other RNA
tacttgtccaggtggaaagtgtc

SEQ ID NO: 171 - RNA, 23 nt, synthetic construct
  misc_feature 1..23: note = Description of sequence: Description: ZPI siRNA antisense strand (unmodified); corresponding positions on NM_016186.3: 1284-1305
  source 1..23: mol_type = other RNA
acatcatgggcaccttaatggtc

SEQ ID NO: 172 - RNA, 23 nt, synthetic construct
  misc_feature 1..23: note = Description of sequence: Description: ZPI siRNA antisense strand (unmodified); corresponding positions on NM_016186.3: 1320-1341
  source 1..23: mol_type = other RNA
tcttgtcaaaggtggaggcaaac

SEQ ID NO: 173 - RNA, 23 nt, synthetic construct
  misc_feature 1..23: note = Description of sequence: Description: ZPI siRNA antisense strand (unmodified); corresponding positions on NM_016186.3: 1261-1282
  source 1..23: mol_type = other RNA
ttgtacttgtccaggtggaaagt

SEQ ID NO: 174 - RNA, 23 nt, synthetic construct
  misc_feature 1..23: note = Description of sequence: Description: ZPI siRNA antisense strand (unmodified); corresponding positions on NM_016186.3: 1356-1377
  source 1..23: mol_type = other RNA
cttggtagggcagtttgaggaca

SEQ ID NO: 175 - RNA, 23 nt, synthetic construct
  misc_feature 1..23: note = Description of sequence: Description: ZPI siRNA antisense strand (unmodified); corresponding positions on NM_016186.3: 1362-1383
  source 1..23: mol_type = other RNA
catttccttggtagggcagtttg

SEQ ID NO: 176 - RNA, 23 nt, synthetic construct
  misc_feature 1..23: note = Description of sequence: Description: ZPI siRNA antisense strand (unmodified); corresponding positions on NM_016186.3: 1357-1378
  source 1..23: mol_type = other RNA
ccttggtagggcagtttgaggac

SEQ ID NO: 177 - RNA, 23 nt, synthetic construct
  misc_feature 1..23: note = Description of sequence: Description: ZPI siRNA antisense strand (unmodified); corresponding positions on NM_016186.3: 1355-1376
  source 1..23: mol_type = other RNA
ttggtagggcagtttgaggacat

SEQ ID NO: 178 - RNA, 23 nt, synthetic construct
  misc_feature 1..23: note = Description of sequence: Description: ZPI siRNA antisense strand (unmodified); corresponding positions on NM_016186.3: 1256-1277
  source 1..23: mol_type = other RNA
cttgtccaggtggaaagtgtcga

SEQ ID NO: 179 - RNA, 23 nt, synthetic construct
  misc_feature 1..23: note = Description of sequence: Description: ZPI siRNA antisense strand (unmodified); corresponding positions on NM_016186.3: 1319-1340
  source 1..23: mol_type = other RNA
cttgtcaaaggtggaggcaaact

SEQ ID NO: 180 - RNA, 23 nt, synthetic construct
  misc_feature 1..23: note = Description of sequence: Description: ZPI siRNA antisense strand (unmodified); corresponding positions on NM_016186.3: 1257-1278
  source 1..23: mol_type = other RNA
acttgtccaggtggaaagtgtcg

SEQ ID NO: 181 - RNA, 23 nt, synthetic construct
  misc_feature 1..23: note = Description of sequence: Description: ZPI siRNA antisense strand (unmodified); corresponding positions on NM_016186.3: 1262-1283
  source 1..23: mol_type = other RNA
cttgtacttgtccaggtggaaag

SEQ ID NO: 182 - RNA, 23 nt, synthetic construct
  misc_feature 1..23: note = Description of sequence: Description: ZPI siRNA antisense strand (unmodified); corresponding positions on NM_016186.3: 1260-1281
  source 1..23: mol_type = other RNA
tgtacttgtccaggtggaaagtg

SEQ ID NO: 183 - RNA, 23 nt, synthetic construct
  misc_feature 1..23: note = Description of sequence: Description: ZPI siRNA antisense strand (unmodified); corresponding positions on NM_016186.3: 1358-1379
  source 1..23: mol_type = other RNA
tccttggtagggcagtttgagga

SEQ ID NO: 184 - RNA, 23 nt, synthetic construct
  misc_feature 1..23: note = Description of sequence: Description: ZPI siRNA antisense strand (unmodified); corresponding positions on NM_016186.3: 1198-1219
  source 1..23: mol_type = other RNA
ttccctttgaacaagatgtaatc

SEQ ID NO: 185 - RNA, 23 nt, synthetic construct
  misc_feature 1..23: note = Description of sequence: Description: ZPI siRNA antisense strand (unmodified); corresponding positions on NM_016186.3: 1381-1402
  source 1..23: mol_type = other RNA
aggaccaccagcatggtggcatt

SEQ ID NO: 186 - RNA, 23 nt, synthetic construct
  misc_feature 1..23: note = Description of sequence: Description: ZPI siRNA antisense strand (unmodified); corresponding positions on NM_016186.3: 1038-1059
  source 1..23: mol_type = other RNA
tatcaaaatacctcttggataaa

SEQ ID NO: 187 - RNA, 23 nt, synthetic construct
  misc_feature 1..23: note = Description of sequence: Description: ZPI siRNA antisense strand (unmodified); corresponding positions on NM_016186.3: 1378-1399
  source 1..23: mol_type = other RNA
accaccagcatggtggcatttcc

SEQ ID NO: 188 - RNA, 23 nt, synthetic construct
  misc_feature 1..23: note = Description of sequence: Description: ZPI siRNA antisense strand (unmodified); corresponding positions on NM_016186.3: 1197-1218
  source 1..23: mol_type = other RNA
tccctttgaacaagatgtaatcc

SEQ ID NO: 189 - RNA, 23 nt, synthetic construct
  misc_feature 1..23: note = Description of sequence: Description: ZPI siRNA antisense strand (unmodified); corresponding positions on NM_016186.3: 766-787
  source 1..23: mol_type = other RNA
ttgccatcgtgcctcatggagat

SEQ ID NO: 190 - RNA, 23 nt, synthetic construct
  misc_feature 1..23: note = Description of sequence: Description: ZPI siRNA antisense strand (unmodified); corresponding positions on NM_016186.3: 1721-1742
  source 1..23: mol_type = other RNA
tttgatgacaggaggcatggaat

SEQ ID NO: 191 - RNA, 23 nt, synthetic construct
  misc_feature 1..23: note = Description of sequence: Description: ZPI siRNA antisense strand (unmodified); corresponding positions on NM_016186.3: 1719-1740
  source 1..23: mol_type = other RNA
tgatgacaggaggcatggaataa

SEQ ID NO: 192 - RNA, 23 nt, synthetic construct
  misc_feature 1..23: note = Description of sequence: Description: ZPI siRNA antisense strand (unmodified); corresponding positions on NM_016186.3: 1373-1394
  source 1..23: mol_type = other RNA
cagcatggtggcatttccttggt

SEQ ID NO: 193 - RNA, 23 nt, synthetic construct
  misc_feature 1..23: note = Description of sequence: Description: ZPI siRNA antisense strand (unmodified); corresponding positions on NM_016186.3: 1392-1413
  source 1..23: mol_type = other RNA
ttttctccatgaggaccaccagc

SEQ ID NO: 194 - RNA, 23 nt, synthetic construct
  misc_feature 1..23: note = Description of sequence: Description: ZPI siRNA antisense strand (unmodified); corresponding positions on NM_016186.3: 1202-1223
  source 1..23: mol_type = other RNA
ccatttccctttgaacaagatgt

SEQ ID NO: 195 - RNA, 23 nt, synthetic construct
  misc_feature 1..23: note = Description of sequence: Description: ZPI siRNA antisense strand (unmodified); corresponding positions on NM_016186.3: 1374-1395
  source 1..23: mol_type = other RNA
ccagcatggtggcatttccttgg

SEQ ID NO: 196 - RNA, 23 nt, synthetic construct
  misc_feature 1..23: note = Description of sequence: Description: ZPI siRNA antisense strand (unmodified); corresponding positions on NM_016186.3: 1322-1343
  source 1..23: mol_type = other RNA
attcttgtcaaaggtggaggcaa

SEQ ID NO: 197 - RNA, 23 nt, synthetic construct
  misc_feature 1..23: note = Description of sequence: Description: ZPI siRNA antisense strand (unmodified); corresponding positions on NM_016186.3: 985-1006
  source 1..23: mol_type = other RNA
ttgtggatgaaggcaaaactccc

SEQ ID NO: 198 - RNA, 23 nt, synthetic construct
  misc_feature 1..23: note = Description of sequence: Description: ZPI siRNA antisense strand (unmodified); corresponding positions on NM_016186.3: 754-775
  source 1..23: mol_type = other RNA
ctcatggagatctttcgcagcag

SEQ ID NO: 199 - RNA, 23 nt, synthetic construct
  misc_feature 1..23: note = Description of sequence: Description: ZPI siRNA antisense strand (unmodified); corresponding positions on NM_016186.3: 1317-1338
  source 1..23: mol_type = other RNA
tgtcaaaggtggaggcaaacttg

SEQ ID NO: 200 - RNA, 23 nt, synthetic construct
  misc_feature 1..23: note = Description of sequence: Description: ZPI siRNA antisense strand (unmodified); corresponding positions on NM_016186.3: 1318-1339
  source 1..23: mol_type = other RNA
ttgtcaaaggtggaggcaaactt

SEQ ID NO: 201 - RNA, 23 nt, synthetic construct
  misc_feature 1..23: note = Description of sequence: Description: ZPI siRNA antisense strand (unmodified); corresponding positions on NM_016186.3: 1201-1222
  source 1..23: mol_type = other RNA
catttccctttgaacaagatgta

SEQ ID NO: 202 - RNA, 23 nt, synthetic construct
  misc_feature 1..23: note = Description of sequence: Description: ZPI siRNA antisense strand (unmodified); corresponding positions on NM_016186.3: 984-1005
  source 1..23: mol_type = other RNA
tgtggatgaaggcaaaactcccc

SEQ ID NO: 203 - RNA, 23 nt, synthetic construct
  misc_feature 1..23: note = Description of sequence: Description: ZPI siRNA antisense strand (unmodified); corresponding positions on NM_016186.3: 755-776
  source 1..23: mol_type = other RNA
cctcatggagatctttcgcagca

SEQ ID NO: 204 - RNA, 23 nt, synthetic construct
  misc_feature 1..23: note = Description of sequence: Description: ZPI siRNA antisense strand (unmodified); corresponding positions on NM_016186.3: 1722-1743
  source 1..23: mol_type = other RNA
ctttgatgacaggaggcatggaa

SEQ ID NO: 205 - RNA, 23 nt, synthetic construct
  misc_feature 1..23: note = Description of sequence: Description: ZPI siRNA antisense strand (unmodified); corresponding positions on NM_016186.3: 1794-1815
  source 1..23: mol_type = other RNA
tcaccaccctgcccagaaacaga

SEQ ID NO: 206 - RNA, 23 nt, synthetic construct
  misc_feature 1..23: note = Description of sequence: Description: ZPI siRNA antisense strand (unmodified); corresponding positions on NM_016186.3: 750-771
  source 1..23: mol_type = other RNA
tggagatctttcgcagcaggctg

SEQ ID NO: 207 - RNA, 23 nt, synthetic construct
  misc_feature 1..23: note = Description of sequence: Description: ZPI siRNA antisense strand (unmodified); corresponding positions on NM_016186.3: 1152-1173
  source 1..23: mol_type = other RNA
gattaatctcatcaaacagtttg

SEQ ID NO: 208 - RNA, 23 nt, synthetic construct
  misc_feature 1..23: note = Description of sequence: Description: ZPI siRNA antisense strand (unmodified); corresponding positions on NM_016186.3: 1724-1745
  source 1..23: mol_type = other RNA
cactttgatgacaggaggcatgg

SEQ ID NO: 209 - RNA, 23 nt, synthetic construct
  misc_feature 1..23: note = Description of sequence: Description: ZPI siRNA antisense strand (unmodified); corresponding positions on NM_016186.3: 1530-1551
  source 1..23: mol_type = other RNA
gcagctcatgcatctcatacttc

SEQ ID NO: 210 - RNA, 23 nt, synthetic construct
  misc_feature 1..23: note = Description of sequence: Description: ZPI siRNA antisense strand (unmodified); corresponding positions on NM_016186.3: 1529-1550
  source 1..23: mol_type = other RNA
cagctcatgcatctcatacttct

SEQ ID NO: 211 - RNA, 23 nt, synthetic construct
  misc_feature 1..23: note = Description of sequence: Description: ZPI siRNA antisense strand (unmodified); corresponding positions on NM_016186.3: 1354-1375
  source 1..23: mol_type = other RNA
tggtagggcagtttgaggacatg

SEQ ID NO: 212 - RNA, 23 nt, synthetic construct
  misc_feature 1..23: note = Description of sequence: Description: ZPI siRNA antisense strand (unmodified); corresponding positions on NM_016186.3: 1153-1174
  source 1..23: mol_type = other RNA
ggattaatctcatcaaacagttt

SEQ ID NO: 213 - RNA, 23 nt, synthetic construct
  misc_feature 1..23: note = Description of sequence: Description: ZPI siRNA antisense strand (unmodified); corresponding positions on NM_016186.3: 1282-1303
  source 1..23: mol_type = other RNA
atcatgggcaccttaatggtctt

SEQ ID NO: 214 - RNA, 23 nt, synthetic construct
  misc_feature 1..23: note = Description of sequence: Description: ZPI siRNA antisense strand (unmodified); corresponding positions on NM_016186.3: 1283-1304
  source 1..23: mol_type = other RNA
catcatgggcaccttaatggtct

SEQ ID NO: 215 - RNA, 23 nt, synthetic construct
  misc_feature 1..23: note = Description of sequence: Description: ZPI siRNA antisense strand (unmodified); corresponding positions on NM_016186.3: 1795-1816
  source 1..23: mol_type = other RNA
ttcaccaccctgcccagaaacag

SEQ ID NO: 216 - RNA, 23 nt, synthetic construct
  misc_feature 1..23: note = Description of sequence: Description: ZPI siRNA antisense strand (unmodified); corresponding positions on NM_016186.3: 1791-1812
  source 1..23: mol_type = other RNA
ccaccctgcccagaaacagaagc

SEQ ID NO: 217 - RNA, 23 nt, synthetic construct
  misc_feature 1..23: note = Description of sequence: Description: ZPI siRNA antisense strand (unmodified); corresponding positions on NM_016186.3: 1500-1521
  source 1..23: mol_type = other RNA
gcttgaacttcggaaagaaaact

SEQ ID NO: 218 - RNA, 23 nt, synthetic construct
  misc_feature 1..23: note = Description of sequence: Description: ZPI siRNA antisense strand (unmodified); corresponding positions on NM_016186.3: 1501-1522
  source 1..23: mol_type = other RNA
agcttgaacttcggaaagaaaac

SEQ ID NO: 219 - RNA, 23 nt, synthetic construct
  misc_feature 1..23: note = Description of sequence: Description: ZPI siRNA antisense strand (unmodified); corresponding positions on NM_016186.3: 1792-1813
  source 1..23: mol_type = other RNA
accaccctgcccagaaacagaag

SEQ ID NO: 220 - RNA, 23 nt, synthetic construct
  misc_feature 1..23: note = Description of sequence: Description: ZPI siRNA antisense strand (unmodified); corresponding positions on NM_016186.3: 1353-1374
  source 1..23: mol_type = other RNA
ggtagggcagtttgaggacatga

SEQ ID NO: 221 - RNA, 23 nt, synthetic construct
  misc_feature 1..23: note = Description of sequence: Description: ZPI siRNA antisense strand (unmodified); corresponding positions on NM_016186.3: 1254-1275
  source 1..23: mol_type = other RNA
tgtccaggtggaaagtgtcgact

SEQ ID NO: 222 - RNA, 19 nt, synthetic construct
  misc_feature 1..19: note = Description of sequence: Description: ZPI siRNA antisense strand (unmodified); corresponding positions on NM_016186.3: 995-1014
  source 1..19: mol_type = other RNA
aaatccttgtggatgaagg

SEQ ID NO: 223 - RNA, 19 nt, synthetic construct
  misc_feature 1..19: note = Description of sequence: Description: ZPI siRNA antisense strand (unmodified); corresponding positions on NM_016186.3: 760-779
  source 1..19: mol_type = other RNA
gcctcatggagatctttcg

SEQ ID NO: 224 - RNA, 19 nt, synthetic construct
  misc_feature 1..19: note = Description of sequence: Description: ZPI siRNA antisense strand (unmodified); corresponding positions on NM_016186.3: 1394-1413
  source 1..19: mol_type = other RNA
ttctccatgaggaccacca

SEQ ID NO: 225 - RNA, 19 nt, synthetic construct
  misc_feature 1..19: note = Description of sequence: Description: ZPI siRNA antisense strand (unmodified); corresponding positions on NM_016186.3: 761-780
  source 1..19: mol_type = other RNA
tgcctcatggagatctttc

SEQ ID NO: 226 - RNA, 19 nt, synthetic construct
  misc_feature 1..19: note = Description of sequence: Description: ZPI siRNA antisense strand (unmodified); corresponding positions on NM_016186.3: 1535-1554
  source 1..19: mol_type = other RNA
agcagctcatgcatctcat

SEQ ID NO: 227 - RNA, 19 nt, synthetic construct
  misc_feature 1..19: note = Description of sequence: Description: ZPI siRNA antisense strand (unmodified); corresponding positions on NM_016186.3: 1160-1179
  source 1..19: mol_type = other RNA
tcaggattaatctcatcaa

SEQ ID NO: 228 - RNA, 19 nt, synthetic construct
  misc_feature 1..19: note = Description of sequence: Description: ZPI siRNA antisense strand (unmodified); corresponding positions on NM_016186.3: 1166-1185
  source 1..19: mol_type = other RNA
ttggtttcaggattaatct

SEQ ID NO: 229 - RNA, 19 nt, synthetic construct
  misc_feature 1..19: note = Description of sequence: Description: ZPI siRNA antisense strand (unmodified); corresponding positions on NM_016186.3: 1163-1182
  source 1..19: mol_type = other RNA
gtttcaggattaatctcat

SEQ ID NO: 230 - RNA, 19 nt, synthetic construct
  misc_feature 1..19: note = Description of sequence: Description: ZPI siRNA antisense strand (unmodified); corresponding positions on NM_016186.3: 1165-1184
  source 1..19: mol_type = other RNA
tggtttcaggattaatctc

SEQ ID NO: 231 - RNA, 19 nt, synthetic construct
  misc_feature 1..19: note = Description of sequence: Description: ZPI siRNA antisense strand (unmodified); corresponding positions on NM_016186.3: 1164-1183
  source 1..19: mol_type = other RNA
ggtttcaggattaatctca

SEQ ID NO: 232 - RNA, 19 nt, synthetic construct
  misc_feature 1..19: note = Description of sequence: Description: ZPI siRNA antisense strand (unmodified); corresponding positions on NM_016186.3: 1158-1177
  source 1..19: mol_type = other RNA
aggattaatctcatcaaac

SEQ ID NO: 233 - RNA, 19 nt, synthetic construct
  misc_feature 1..19: note = Description of sequence: Description: ZPI siRNA antisense strand (unmodified); corresponding positions on NM_016186.3: 992-1011
  source 1..19: mol_type = other RNA
tccttgtggatgaaggcaa

SEQ ID NO: 234 - RNA, 19 nt, synthetic construct
  misc_feature 1..19: note = Description of sequence: Description: ZPI siRNA antisense strand (unmodified); corresponding positions on NM_016186.3: 762-781
  source 1..19: mol_type = other RNA
gtgcctcatggagatcttt

SEQ ID NO: 235 - RNA, 19 nt, synthetic construct
  misc_feature 1..19: note = Description of sequence: Description: ZPI siRNA antisense strand (unmodified); corresponding positions on NM_016186.3: 1393-1412
  source 1..19: mol_type = other RNA
tctccatgaggaccaccag

SEQ ID NO: 236 - RNA, 19 nt, synthetic construct
  misc_feature 1..19: note = Description of sequence: Description: ZPI siRNA antisense strand (unmodified); corresponding positions on NM_016186.3: 997-1016
  source 1..19: mol_type = other RNA
caaaatccttgtggatgaa

SEQ ID NO: 237 - RNA, 19 nt, synthetic construct
  misc_feature 1..19: note = Description of sequence: Description: ZPI siRNA antisense strand (unmodified); corresponding positions on NM_016186.3: 763-782
  source 1..19: mol_type = other RNA
cgtgcctcatggagatctt

SEQ ID NO: 238 - RNA, 19 nt, synthetic construct
  misc_feature 1..19: note = Description of sequence: Description: ZPI siRNA antisense strand (unmodified); corresponding positions on NM_016186.3: 999-1018
  source 1..19: mol_type = other RNA
atcaaaatccttgtggatg

SEQ ID NO: 239 - RNA, 19 nt, synthetic construct
  misc_feature 1..19: note = Description of sequence: Description: ZPI siRNA antisense strand (unmodified); corresponding positions on NM_016186.3: 1161-1180
  source 1..19: mol_type = other RNA
ttcaggattaatctcatca

SEQ ID NO: 240 - RNA, 19 nt, synthetic construct
  misc_feature 1..19: note = Description of sequence: Description: ZPI siRNA antisense strand (unmodified); corresponding positions on NM_016186.3: 994-1013
  source 1..19: mol_type = other RNA
aatccttgtggatgaaggc

SEQ ID NO: 241 - RNA, 19 nt, synthetic construct
  misc_feature 1..19: note = Description of sequence: Description: ZPI siRNA antisense strand (unmodified); corresponding positions on NM_016186.3: 767-786
  source 1..19: mol_type = other RNA
ccatcgtgcctcatggaga

SEQ ID NO: 242 - RNA, 21 nt, synthetic construct
  misc_feature 1..21: note = Description of sequence: Description: ZPI siRNA sense strand (unmodified) corresponding positions on NM_016186.3: 991-1012
  source 1..21: mol_type = other RNA
tgccttcatccacaaggattt

SEQ ID NO: 243 - RNA, 21 nt, synthetic construct
  misc_feature 1..21: note = Description of sequence: Description: ZPI siRNA sense strand (unmodified) corresponding positions on NM_016186.3: 756-777
  source 1..21: mol_type = other RNA
tgcgaaagatctccatgaggc

SEQ ID NO: 244 - RNA, 21 nt, synthetic construct
  misc_feature 1..21: note = Description of sequence: Description: ZPI siRNA sense strand (unmodified) corresponding positions on NM_016186.3: 1390-1411
  source 1..21: mol_type = other RNA
gctggtggtcctcatggagaa

SEQ ID NO: 245 - RNA, 21 nt, synthetic construct
  misc_feature 1..21: note = Description of sequence: Description: ZPI siRNA sense strand (unmodified) corresponding positions on NM_016186.3: 757-778
  source 1..21: mol_type = other RNA
gcgaaagatctccatgaggca

SEQ ID NO: 246 - RNA, 21 nt, synthetic construct
  misc_feature 1..21: note = Description of sequence: Description: ZPI siRNA sense strand (unmodified) corresponding positions on NM_016186.3: 1531-1552
  source 1..21: mol_type = other RNA
gtatgagatgcatgagctgct

SEQ ID NO: 247 - RNA, 21 nt, synthetic construct
  misc_feature 1..21: note = Description of sequence: Description: ZPI siRNA sense strand (unmodified) corresponding positions on NM_016186.3: 1156-1177
  source 1..21: mol_type = other RNA
gtttgatgagattaatcctga

SEQ ID NO: 248 - RNA, 21 nt, synthetic construct
  misc_feature 1..21: note = Description of sequence: Description: ZPI siRNA sense strand (unmodified) corresponding positions on NM_016186.3: 1162-1183
  source 1..21: mol_type = other RNA
tgagattaatcctgaaaccaa

SEQ ID NO: 249 - RNA, 21 nt, synthetic construct
  misc_feature 1..21: note = Description of sequence: Description: ZPI siRNA sense strand (unmodified) corresponding positions on NM_016186.3: 1159-1180
  source 1..21: mol_type = other RNA
tgatgagattaatcctgaaac

SEQ ID NO: 250 - RNA, 21 nt, synthetic construct
  misc_feature 1..21: note = Description of sequence: Description: ZPI siRNA sense strand (unmodified) corresponding positions on NM_016186.3: 1161-1182
  source 1..21: mol_type = other RNA
atgagattaatcctgaaacca

SEQ ID NO: 251 - RNA, 21 nt, synthetic construct
  misc_feature 1..21: note = Description of sequence: Description: ZPI siRNA sense strand (unmodified) corresponding positions on NM_016186.3: 1160-1181
  source 1..21: mol_type = other RNA
gatgagattaatcctgaaacc

SEQ ID NO: 252 - RNA, 21 nt, synthetic construct
  misc_feature 1..21: note = Description of sequence: Description: ZPI siRNA sense strand (unmodified) corresponding positions on NM_016186.3: 1154-1175
  source 1..21: mol_type = other RNA
ctgtttgatgagattaatcct

SEQ ID NO: 253 - RNA, 21 nt, synthetic construct
  misc_feature 1..21: note = Description of sequence: Description: ZPI siRNA sense strand (unmodified) corresponding positions on NM_016186.3: 988-1009
  source 1..21: mol_type = other RNA
ttttgccttcatccacaagga

SEQ ID NO: 254 - RNA, 21 nt, synthetic construct
  misc_feature 1..21: note = Description of sequence: Description: ZPI siRNA sense strand (unmodified) corresponding positions on NM_016186.3: 758-779
  source 1..21: mol_type = other RNA
cgaaagatctccatgaggcac

SEQ ID NO: 255 - RNA, 21 nt, synthetic construct
  misc_feature 1..21: note = Description of sequence: Description: ZPI siRNA sense strand (unmodified) corresponding positions on NM_016186.3: 1389-1410
  source 1..21: mol_type = other RNA
tgctggtggtcctcatggaga

SEQ ID NO: 256 - RNA, 21 nt, synthetic construct
  misc_feature 1..21: note = Description of sequence: Description: ZPI siRNA sense strand (unmodified) corresponding positions on NM_016186.3: 993-1014
  source 1..21: mol_type = other RNA
ccttcatccacaaggattttg

SEQ ID NO: 257 - RNA, 21 nt, synthetic construct
  misc_feature 1..21: note = Description of sequence: Description: ZPI siRNA sense strand (unmodified) corresponding positions on NM_016186.3: 759-780
  source 1..21: mol_type = other RNA
gaaagatctccatgaggcacg

SEQ ID NO: 258 - RNA, 21 nt, synthetic construct
  misc_feature 1..21: note = Description of sequence: Description: ZPI siRNA sense strand (unmodified) corresponding positions on NM_016186.3: 995-1016
  source 1..21: mol_type = other RNA
ttcatccacaaggattttgat

SEQ ID NO: 259 - RNA, 21 nt, synthetic construct
  misc_feature 1..21: note = Description of sequence: Description: ZPI siRNA sense strand (unmodified) corresponding positions on NM_016186.3: 1157-1178
  source 1..21: mol_type = other RNA
tttgatgagattaatcctgaa

SEQ ID NO: 260 - RNA, 21 nt, synthetic construct
  misc_feature 1..21: note = Description of sequence: Description: ZPI siRNA sense strand (unmodified) corresponding positions on NM_016186.3: 990-1011
  source 1..21: mol_type = other RNA
ttgccttcatccacaaggatt

SEQ ID NO: 261 - RNA, 21 nt, synthetic construct
  misc_feature 1..21: note = Description of sequence: Description: ZPI siRNA sense strand (unmodified) corresponding positions on NM_016186.3: 763-784
  source 1..21: mol_type = other RNA
gatctccatgaggcacgatgg

SEQ ID NO: 262 - RNA, 21 nt, synthetic construct
  misc_feature 1..21: note = Description of sequence: Description: ZPI siRNA sense strand (unmodified) corresponding positions on NM_016186.3: 1387-1408
  source 1..21: mol_type = other RNA
catgctggtggtcctcatgga

SEQ ID NO: 263 - RNA, 21 nt, synthetic construct
  misc_feature 1..21: note = Description of sequence: Description: ZPI siRNA sense strand (unmodified) corresponding positions on NM_016186.3: 989-1010
  source 1..21: mol_type = other RNA
tttgccttcatccacaaggat

SEQ ID NO: 264 - RNA, 21 nt, synthetic construct
  misc_feature 1..21: note = Description of sequence: Description: ZPI siRNA sense strand (unmodified) corresponding positions on NM_016186.3: 992-1013
  source 1..21: mol_type = other RNA
gccttcatccacaaggatttt

SEQ ID NO: 265 - RNA, 21 nt, synthetic construct
  misc_feature 1..21: note = Description of sequence: Description: ZPI siRNA sense strand (unmodified) corresponding positions on NM_016186.3: 1370-1391
  source 1..21: mol_type = other RNA
taccaaggaaatgccaccatg

SEQ ID NO: 266 - RNA, 21 nt, synthetic construct
  misc_feature 1..21: note = Description of sequence: Description: ZPI siRNA sense strand (unmodified) corresponding positions on NM_016186.3: 1158-1179
  source 1..21: mol_type = other RNA
ttgatgagattaatcctgaaa

SEQ ID NO: 267 - RNA, 21 nt, synthetic construct
  misc_feature 1..21: note = Description of sequence: Description: ZPI siRNA sense strand (unmodified) corresponding positions on NM_016186.3: 994-1015
  source 1..21: mol_type = other RNA
cttcatccacaaggattttga

SEQ ID NO: 268 - RNA, 21 nt, synthetic construct
  misc_feature 1..21: note = Description of sequence: Description: ZPI siRNA sense strand (unmodified) corresponding positions on NM_016186.3: 760-781
  source 1..21: mol_type = other RNA
aaagatctccatgaggcacga

SEQ ID NO: 269 - RNA, 21 nt, synthetic construct
  misc_feature 1..21: note = Description of sequence: Description: ZPI siRNA sense strand (unmodified) corresponding positions on NM_016186.3: 1155-1176
  source 1..21: mol_type = other RNA
tgtttgatgagattaatcctg

SEQ ID NO: 270 - RNA, 21 nt, synthetic construct
  misc_feature 1..21: note = Description of sequence: Description: ZPI siRNA sense strand (unmodified) corresponding positions on NM_016186.3: 1388-1409
  source 1..21: mol_type = other RNA
atgctggtggtcctcatggag

SEQ ID NO: 271 - RNA, 21 nt, synthetic construct
  misc_feature 1..21: note = Description of sequence: Description: ZPI siRNA sense strand (unmodified) corresponding positions on NM_016186.3: 987-1008
  source 1..21: mol_type = other RNA
gttttgccttcatccacaagg

SEQ ID NO: 272 - RNA, 21 nt, synthetic construct
  misc_feature 1..21: note = Description of sequence: Description: ZPI siRNA sense strand (unmodified) corresponding positions on NM_016186.3: 1383-1404
  source 1..21: mol_type = other RNA
ccaccatgctggtggtcctca

SEQ ID NO: 273 - RNA, 21 nt, synthetic construct
  misc_feature 1..21: note = Description of sequence: Description: ZPI siRNA sense strand (unmodified) corresponding positions on NM_016186.3: 1384-1405
  source 1..21: mol_type = other RNA
caccatgctggtggtcctcat

SEQ ID NO: 274 - RNA, 21 nt, synthetic construct
  misc_feature 1..21: note = Description of sequence: Description: ZPI siRNA sense strand (unmodified) corresponding positions on NM_016186.3: 761-782
  source 1..21: mol_type = other RNA
aagatctccatgaggcacgat

SEQ ID NO: 275 - RNA, 21 nt, synthetic construct
  misc_feature 1..21: note = Description of sequence: Description: ZPI siRNA sense strand (unmodified) corresponding positions on NM_016186.3: 986-1007
  source 1..21: mol_type = other RNA
agttttgccttcatccacaag

SEQ ID NO: 276 - RNA, 21 nt, synthetic construct
  misc_feature 1..21: note = Description of sequence: Description: ZPI siRNA sense strand (unmodified) corresponding positions on NM_016186.3: 1385-1406
  source 1..21: mol_type = other RNA
accatgctggtggtcctcatg

SEQ ID NO: 277 - RNA, 21 nt, synthetic construct
  misc_feature 1..21: note = Description of sequence: Description: ZPI siRNA sense strand (unmodified) corresponding positions on NM_016186.3: 762-783
  source 1..21: mol_type = other RNA
agatctccatgaggcacgatg

SEQ ID NO: 278 - RNA, 21 nt, synthetic construct
  misc_feature 1..21: note = Description of sequence: Description: ZPI siRNA sense strand (unmodified) corresponding positions on NM_016186.3: 1386-1407
  source 1..21: mol_type = other RNA
ccatgctggtggtcctcatgg

SEQ ID NO: 279 - RNA, 21 nt, synthetic construct
  misc_feature 1..21: note = Description of sequence: Description: ZPI siRNA sense strand (unmodified) corresponding positions on NM_016186.3: 1321-1342
  source 1..21: mol_type = other RNA
tgcctccacctttgacaagaa

SEQ ID NO: 280 - RNA, 21 nt, synthetic construct
  misc_feature 1..21: note = Description of sequence: Description: ZPI siRNA sense strand (unmodified) corresponding positions on NM_016186.3: 1323-1344
  source 1..21: mol_type = other RNA
cctccacctttgacaagaatt

SEQ ID NO: 281 - RNA, 21 nt, synthetic construct
  misc_feature 1..21: note = Description of sequence: Description: ZPI siRNA sense strand (unmodified) corresponding positions on NM_016186.3: 1285-1306
  source 1..21: mol_type = other RNA
cattaaggtgcccatgatgta

SEQ ID NO: 282 - RNA, 21 nt, synthetic construct
  misc_feature 1..21: note = Description of sequence: Description: ZPI siRNA sense strand (unmodified) corresponding positions on NM_016186.3: 1364-1385
  source 1..21: mol_type = other RNA
ctgccctaccaaggaaatgcc

SEQ ID NO: 283 - RNA, 21 nt, synthetic construct
  misc_feature 1..21: note = Description of sequence: Description: ZPI siRNA sense strand (unmodified) corresponding positions on NM_016186.3: 1360-1381
  source 1..21: mol_type = other RNA
caaactgccctaccaaggaaa

SEQ ID NO: 284 - RNA, 21 nt, synthetic construct
  misc_feature 1..21: note = Description of sequence: Description: ZPI siRNA sense strand (unmodified) corresponding positions on NM_016186.3: 1359-1380
  source 1..21: mol_type = other RNA
tcaaactgccctaccaaggaa

SEQ ID NO: 285 - RNA, 21 nt, synthetic construct
  misc_feature 1..21: note = Description of sequence: Description: ZPI siRNA sense strand (unmodified) corresponding positions on NM_016186.3: 1324-1345
  source 1..21: mol_type = other RNA
ctccacctttgacaagaattt

SEQ ID NO: 286 - RNA, 21 nt, synthetic construct
  misc_feature 1..21: note = Description of sequence: Description: ZPI siRNA sense strand (unmodified) corresponding positions on NM_016186.3: 1255-1276
  source 1..21: mol_type = other RNA
cgacactttccacctggacaa

SEQ ID NO: 287 - RNA, 21 nt, synthetic construct
  misc_feature 1..21: note = Description of sequence: Description: ZPI siRNA sense strand (unmodified) corresponding positions on NM_016186.3: 1259-1280
  source 1..21: mol_type = other RNA
actttccacctggacaagtac

SEQ ID NO: 288 - RNA, 21 nt, synthetic construct
  misc_feature 1..21: note = Description of sequence: Description: ZPI siRNA sense strand (unmodified) corresponding positions on NM_016186.3: 1361-1382
  source 1..21: mol_type = other RNA
aaactgccctaccaaggaaat

SEQ ID NO: 289 - RNA, 21 nt, synthetic construct
  misc_feature 1..21: note = Description of sequence: Description: ZPI siRNA sense strand (unmodified) corresponding positions on NM_016186.3: 1363-1384
  source 1..21: mol_type = other RNA
actgccctaccaaggaaatgc

SEQ ID NO: 290 - RNA, 21 nt, synthetic construct
  misc_feature 1..21: note = Description of sequence: Description: ZPI siRNA sense strand (unmodified) corresponding positions on NM_016186.3: 1258-1279
  source 1..21: mol_type = other RNA
cactttccacctggacaagta

SEQ ID NO: 291 - RNA, 21 nt, synthetic construct
  misc_feature 1..21: note = Description of sequence: Description: ZPI siRNA sense strand (unmodified) corresponding positions on NM_016186.3: 1284-1305
  source 1..21: mol_type = other RNA
ccattaaggtgcccatgatgt

SEQ ID NO: 292 - RNA, 21 nt, synthetic construct
  misc_feature 1..21: note = Description of sequence: Description: ZPI siRNA sense strand (unmodified) corresponding positions on NM_016186.3: 1320-1341
  source 1..21: mol_type = other RNA
ttgcctccacctttgacaaga

SEQ ID NO: 293 - RNA, 21 nt, synthetic construct
  misc_feature 1..21: note = Description of sequence: Description: ZPI siRNA sense strand (unmodified) corresponding positions on NM_016186.3: 1261-1282
  source 1..21: mol_type = other RNA
tttccacctggacaagtacaa

SEQ ID NO: 294 - RNA, 21 nt, synthetic construct
  misc_feature 1..21: note = Description of sequence: Description: ZPI siRNA sense strand (unmodified) corresponding positions on NM_016186.3: 1356-1377
  source 1..21: mol_type = other RNA
tcctcaaactgccctaccaag

SEQ ID NO: 295 - RNA, 21 nt, synthetic construct
  misc_feature 1..21: note = Description of sequence: Description: ZPI siRNA sense strand (unmodified) corresponding positions on NM_016186.3: 1362-1383
  source 1..21: mol_type = other RNA
aactgccctaccaaggaaatg

SEQ ID NO: 296 - RNA, 21 nt, synthetic construct
  misc_feature 1..21: note = Description of sequence: Description: ZPI siRNA sense strand (unmodified) corresponding positions on NM_016186.3: 1357-1378
  source 1..21: mol_type = other RNA
cctcaaactgccctaccaagg

SEQ ID NO: 297 - RNA, 21 nt, synthetic construct
  misc_feature 1..21: note = Description of sequence: Description: ZPI siRNA sense strand (unmodified) corresponding positions on NM_016186.3: 1355-1376
  source 1..21: mol_type = other RNA
gtcctcaaactgccctaccaa

SEQ ID NO: 298 - RNA, 21 nt, synthetic construct
  misc_feature 1..21: note = Description of sequence: Description: ZPI siRNA sense strand (unmodified) corresponding positions on NM_016186.3: 1256-1277
  source 1..21: mol_type = other RNA
gacactttccacctggacaag

SEQ ID NO: 299 - RNA, 21 nt, synthetic construct
  misc_feature 1..21: note = Description of sequence: Description: ZPI siRNA sense strand (unmodified) corresponding positions on NM_016186.3: 1319-1340
  source 1..21: mol_type = other RNA
tttgcctccacctttgacaag

SEQ ID NO: 300 - RNA, 21 nt, synthetic construct
  misc_feature 1..21: note = Description of sequence: Description: ZPI siRNA sense strand (unmodified) corresponding positions on NM_016186.3: 1257-1278
  source 1..21: mol_type = other RNA
acactttccacctggacaagt

SEQ ID NO: 301 - RNA, 21 nt, synthetic construct
  misc_feature 1..21: note = Description of sequence: Description: ZPI siRNA sense strand (unmodified) corresponding positions on NM_016186.3: 1262-1283
  source 1..21: mol_type = other RNA
ttccacctggacaagtacaag

SEQ ID NO: 302 - RNA, 21 nt, synthetic construct
  misc_feature 1..21: note = Description of sequence: Description: ZPI siRNA sense strand (unmodified) corresponding positions on NM_016186.3: 1260-1281
  source 1..21: mol_type = other RNA
ctttccacctggacaagtaca

SEQ ID NO: 303 - RNA, 21 nt, synthetic construct
  misc_feature 1..21: note = Description of sequence: Description: ZPI siRNA sense strand (unmodified) corresponding positions on NM_016186.3: 1358-1379
  source 1..21: mol_type = other RNA
ctcaaactgccctaccaagga

SEQ ID NO: 304 - RNA, 21 nt, synthetic construct
  misc_feature 1..21: note = Description of sequence: Description: ZPI siRNA sense strand (unmodified) corresponding positions on NM_016186.3: 1198-1219
  source 1..21: mol_type = other RNA
ttacatcttgttcaaagggaa

SEQ ID NO: 305 - RNA, 21 nt, synthetic construct
  misc_feature 1..21: note = Description of sequence: Description: ZPI siRNA sense strand (unmodified) corresponding positions on NM_016186.3: 1381-1402
  source 1..21: mol_type = other RNA
tgccaccatgctggtggtcct

SEQ ID NO: 306 - RNA, 21 nt, synthetic construct
  misc_feature 1..21: note = Description of sequence: Description: ZPI siRNA sense strand (unmodified) corresponding positions on NM_016186.3: 1038-1059
  source 1..21: mol_type = other RNA
tatccaagaggtattttgata

SEQ ID NO: 307 - RNA, 21 nt, synthetic construct
  misc_feature 1..21: note = Description of sequence: Description: ZPI siRNA sense strand (unmodified) corresponding positions on NM_016186.3: 1378-1399
  source 1..21: mol_type = other RNA
aaatgccaccatgctggtggt

SEQ ID NO: 308 - RNA, 21 nt, synthetic construct
  misc_feature 1..21: note = Description of sequence: Description: ZPI siRNA sense strand (unmodified) corresponding positions on NM_016186.3: 1197-1218
  source 1..21: mol_type = other RNA
attacatcttgttcaaaggga

SEQ ID NO: 309 - RNA, 21 nt, synthetic construct
  misc_feature 1..21: note = Description of sequence: Description: ZPI siRNA sense strand (unmodified) corresponding positions on NM_016186.3: 766-787
  source 1..21: mol_type = other RNA
ctccatgaggcacgatggcaa

SEQ ID NO: 310 - RNA, 21 nt, synthetic construct
  misc_feature 1..21: note = Description of sequence: Description: ZPI siRNA sense strand (unmodified) corresponding positions on NM_016186.3: 1721-1742
  source 1..21: mol_type = other RNA
tccatgcctcctgtcatcaaa

SEQ ID NO: 311 - RNA, 21 nt, synthetic construct
  misc_feature 1..21: note = Description of sequence: Description: ZPI siRNA sense strand (unmodified) corresponding positions on NM_016186.3: 1719-1740
  source 1..21: mol_type = other RNA
attccatgcctcctgtcatca

SEQ ID NO: 312 - RNA, 21 nt, synthetic construct
  misc_feature 1..21: note = Description of sequence: Description: ZPI siRNA sense strand (unmodified) corresponding positions on NM_016186.3: 1373-1394
  source 1..21: mol_type = other RNA
caaggaaatgccaccatgctg

SEQ ID NO: 313 - RNA, 21 nt, synthetic construct
  misc_feature 1..21: note = Description of sequence: Description: ZPI siRNA sense strand (unmodified) corresponding positions on NM_016186.3: 1392-1413
  source 1..21: mol_type = other RNA
tggtggtcctcatggagaaaa

SEQ ID NO: 314 - RNA, 21 nt, synthetic construct
  misc_feature 1..21: note = Description of sequence: Description: ZPI siRNA sense strand (unmodified) corresponding positions on NM_016186.3: 1202-1223
  source 1..21: mol_type = other RNA
atcttgttcaaagggaaatgg

SEQ ID NO: 315 - RNA, 21 nt, synthetic construct
  misc_feature 1..21: note = Description of sequence: Description: ZPI siRNA sense strand (unmodified) corresponding positions on NM_016186.3: 1374-1395
  source 1..21: mol_type = other RNA
aaggaaatgccaccatgctgg

SEQ ID NO: 316 - RNA, 21 nt, synthetic construct
  misc_feature 1..21: note = Description of sequence: Description: ZPI siRNA sense strand (unmodified) corresponding positions on NM_016186.3: 1322-1343
  source 1..21: mol_type = other RNA
gcctccacctttgacaagaat

SEQ ID NO: 317 - RNA, 21 nt, synthetic construct
  misc_feature 1..21: note = Description of sequence: Description: ZPI siRNA sense strand (unmodified) corresponding positions on NM_016186.3: 985-1006
  source 1..21: mol_type = other RNA
gagttttgccttcatccacaa

SEQ ID NO: 318 - RNA, 21 nt, synthetic construct
  misc_feature 1..21: note = Description of sequence: Description: ZPI siRNA sense strand (unmodified) corresponding positions on NM_016186.3: 754-775
  source 1..21: mol_type = other RNA
gctgcgaaagatctccatgag

SEQ ID NO: 319 - RNA, 21 nt, synthetic construct
  misc_feature 1..21: note = Description of sequence: Description: ZPI siRNA sense strand (unmodified) corresponding positions on NM_016186.3: 1317-1338
  source 1..21: mol_type = other RNA
agtttgcctccacctttgaca

SEQ ID NO: 320 - RNA, 21 nt, synthetic construct
  misc_feature 1..21: note = Description of sequence: Description: ZPI siRNA sense strand (unmodified) corresponding positions on NM_016186.3: 1318-1339
  source 1..21: mol_type = other RNA
gtttgcctccacctttgacaa

SEQ ID NO: 321 - RNA, 21 nt, synthetic construct
  misc_feature 1..21: note = Description of sequence: Description: ZPI siRNA sense strand (unmodified) corresponding positions on NM_016186.3: 1201-1222
  source 1..21: mol_type = other RNA
catcttgttcaaagggaaatg

SEQ ID NO: 322 - RNA, 21 nt, synthetic construct
  misc_feature 1..21: note = Description of sequence: Description: ZPI siRNA sense strand (unmodified) corresponding positions on NM_016186.3: 984-1005
  source 1..21: mol_type = other RNA
ggagttttgccttcatccaca

SEQ ID NO: 323 - RNA, 21 nt, synthetic construct
  misc_feature 1..21: note = Description of sequence: Description: ZPI siRNA sense strand (unmodified) corresponding positions on NM_016186.3: 755-776
  source 1..21: mol_type = other RNA
ctgcgaaagatctccatgagg

SEQ ID NO: 324 - RNA, 21 nt, synthetic construct
  misc_feature 1..21: note = Description of sequence: Description: ZPI siRNA sense strand (unmodified) corresponding positions on NM_016186.3: 1722-1743
  source 1..21: mol_type = other RNA
ccatgcctcctgtcatcaaag

SEQ ID NO: 325 - RNA, 21 nt, synthetic construct
  misc_feature 1..21: note = Description of sequence: Description: ZPI siRNA sense strand (unmodified) corresponding positions on NM_016186.3: 1794-1815
  source 1..21: mol_type = other RNA
tgtttctgggcagggtggtga

SEQ ID NO: 326 - RNA, 21 nt, synthetic construct
  misc_feature 1..21: note = Description of sequence: Description: ZPI siRNA sense strand (unmodified) corresponding positions on NM_016186.3: 750-771
  source 1..21: mol_type = other RNA
gcctgctgcgaaagatctcca

SEQ ID NO: 327 - RNA, 21 nt, synthetic construct
  misc_feature 1..21: note = Description of sequence: Description: ZPI siRNA sense strand (unmodified) corresponding positions on NM_016186.3: 1152-1173
  source 1..21: mol_type = other RNA
aactgtttgatgagattaatc

SEQ ID NO: 328 - RNA, 21 nt, synthetic construct
  misc_feature 1..21: note = Description of sequence: Description: ZPI siRNA sense strand (unmodified) corresponding positions on NM_016186.3: 1724-1745
  source 1..21: mol_type = other RNA
atgcctcctgtcatcaaagtg

SEQ ID NO: 329 - RNA, 21 nt, synthetic construct
  misc_feature 1..21: note = Description of sequence: Description: ZPI siRNA sense strand (unmodified) corresponding positions on NM_016186.3: 1530-1551
  source 1..21: mol_type = other RNA
agtatgagatgcatgagctgc

SEQ ID NO: 330 - RNA, 21 nt, synthetic construct
  misc_feature 1..21: note = Description of sequence: Description: ZPI siRNA sense strand (unmodified) corresponding positions on NM_016186.3: 1529-1550
  source 1..21: mol_type = other RNA
aagtatgagatgcatgagctg

SEQ ID NO: 331 - RNA, 21 nt, synthetic construct
  misc_feature 1..21: note = Description of sequence: Description: ZPI siRNA sense strand (unmodified) corresponding positions on NM_016186.3: 1354-1375
  source 1..21: mol_type = other RNA
tgtcctcaaactgccctacca

SEQ ID NO: 332 - RNA, 21 nt, synthetic construct
  misc_feature 1..21: note = Description of sequence: Description: ZPI siRNA sense strand (unmodified) corresponding positions on NM_016186.3: 1153-1174
  source 1..21: mol_type = other RNA
actgtttgatgagattaatcc

SEQ ID NO: 333 - RNA, 21 nt, synthetic construct
  misc_feature 1..21: note = Description of sequence: Description: ZPI siRNA sense strand (unmodified) corresponding positions on NM_016186.3: 1282-1303
  source 1..21: mol_type = other RNA
gaccattaaggtgcccatgat

SEQ ID NO: 334 - RNA, 21 nt, synthetic construct
  misc_feature 1..21: note = Description of sequence: Description: ZPI siRNA sense strand (unmodified) corresponding positions on NM_016186.3: 1283-1304
  source 1..21: mol_type = other RNA
accattaaggtgcccatgatg

SEQ ID NO: 335 - RNA, 21 nt, synthetic construct
  misc_feature 1..21: note = Description of sequence: Description: ZPI siRNA sense strand (unmodified) corresponding positions on NM_016186.3: 1795-1816
  source 1..21: mol_type = other RNA
gtttctgggcagggtggtgaa

SEQ ID NO: 336 - RNA, 21 nt, synthetic construct
  misc_feature 1..21: note = Description of sequence: Description: ZPI siRNA sense strand (unmodified) corresponding positions on NM_016186.3: 1791-1812
  source 1..21: mol_type = other RNA
ttctgtttctgggcagggtgg

SEQ ID NO: 337 - RNA, 21 nt, synthetic construct
  misc_feature 1..21: note = Description of sequence: Description: ZPI siRNA sense strand (unmodified) corresponding positions on NM_016186.3: 1500-1521
  source 1..21: mol_type = other RNA
ttttctttccgaagttcaagc

SEQ ID NO: 338 - RNA, 21 nt, synthetic construct
  misc_feature 1..21: note = Description of sequence: Description: ZPI siRNA sense strand (unmodified) corresponding positions on NM_016186.3: 1501-1522
  source 1..21: mol_type = other RNA
tttctttccgaagttcaagct

SEQ ID NO: 339 - RNA, 21 nt, synthetic construct
  misc_feature 1..21: note = Description of sequence: Description: ZPI siRNA sense strand (unmodified) corresponding positions on NM_016186.3: 1792-1813
  source 1..21: mol_type = other RNA
tctgtttctgggcagggtggt

SEQ ID NO: 340 - RNA, 21 nt, synthetic construct
  misc_feature 1..21: note = Description of sequence: Description: ZPI siRNA sense strand (unmodified) corresponding positions on NM_016186.3: 1353-1374
  source 1..21: mol_type = other RNA
atgtcctcaaactgccctacc

SEQ ID NO: 341 - RNA, 21 nt, synthetic construct
  misc_feature 1..21: note = Description of sequence: Description: ZPI siRNA sense strand (unmodified) corresponding positions on NM_016186.3: 1254-1275
  source 1..21: mol_type = other RNA
tcgacactttccacctggaca

SEQ ID NO: 342 - RNA, 19 nt, synthetic construct
  misc_feature 1..19: note = Description of sequence: Description: ZPI siRNA sense strand (unmodified) corresponding positions on NM_016186.3: 995-1014
  source 1..19: mol_type = other RNA
ccttcatccacaaggattt

SEQ ID NO: 343 - RNA, 19 nt, synthetic construct
  misc_feature 1..19: note = Description of sequence: Description: ZPI siRNA sense strand (unmodified) corresponding positions on NM_016186.3: 760-779
  source 1..19: mol_type = other RNA
cgaaagatctccatgaggc

SEQ ID NO: 344 - RNA, 19 nt, synthetic construct
  misc_feature 1..19: note = Description of sequence: Description: ZPI siRNA sense strand (unmodified) corresponding positions on NM_016186.3: 1394-1413
  source 1..19: mol_type = other RNA
tggtggtcctcatggagaa

SEQ ID NO: 345 - RNA, 19 nt, synthetic construct
  misc_feature 1..19: note = Description of sequence: Description: ZPI siRNA sense strand (unmodified) corresponding positions on NM_016186.3: 761-780
  source 1..19: mol_type = other RNA
gaaagatctccatgaggca

SEQ ID NO: 346 - RNA, 19 nt, synthetic construct
  misc_feature 1..19: note = Description of sequence: Description: ZPI siRNA sense strand (unmodified) corresponding positions on NM_016186.3: 1535-1554
  source 1..19: mol_type = other RNA
atgagatgcatgagctgct

SEQ ID NO: 347 - RNA, 19 nt, synthetic construct
  misc_feature 1..19: note = Description of sequence: Description: ZPI siRNA sense strand (unmodified) corresponding positions on NM_016186.3: 1160-1179
  source 1..19: mol_type = other RNA
ttgatgagattaatcctga

SEQ ID NO: 348 - RNA, 19 nt, synthetic construct
  misc_feature 1..19: note = Description of sequence: Description: ZPI siRNA sense strand (unmodified) corresponding positions on NM_016186.3: 1166-1185
  source 1..19: mol_type = other RNA
agattaatcctgaaaccaa

SEQ ID NO: 349 - RNA, 19 nt, synthetic construct
  misc_feature 1..19: note = Description of sequence: Description: ZPI siRNA sense strand (unmodified) corresponding positions on NM_016186.3: 1163-1182
  source 1..19: mol_type = other RNA
atgagattaatcctgaaac

SEQ ID NO: 350 - RNA, 19 nt, synthetic construct
  misc_feature 1..19: note = Description of sequence: Description: ZPI siRNA sense strand (unmodified) corresponding positions on NM_016186.3: 1165-1184
  source 1..19: mol_type = other RNA
gagattaatcctgaaacca

SEQ ID NO: 351 - RNA, 19 nt, synthetic construct
  misc_feature 1..19: note = Description of sequence: Description: ZPI siRNA sense strand (unmodified) corresponding positions on NM_016186.3: 1164-1183
  source 1..19: mol_type = other RNA
tgagattaatcctgaaacc

SEQ ID NO: 352 - RNA, 19 nt, synthetic construct
  misc_feature 1..19: note = Description of sequence: Description: ZPI siRNA sense strand (unmodified) corresponding positions on NM_016186.3: 1158-1177
  source 1..19: mol_type = other RNA
gtttgatgagattaatcct

SEQ ID NO: 353 - RNA, 19 nt, synthetic construct
  misc_feature 1..19: note = Description of sequence: Description: ZPI siRNA sense strand (unmodified) corresponding positions on NM_016186.3: 992-1011
  source 1..19: mol_type = other RNA
ttgccttcatccacaagga

SEQ ID NO: 354 - RNA, 19 nt, synthetic construct
  misc_feature 1..19: note = Description of sequence: Description: ZPI siRNA sense strand (unmodified) corresponding positions on NM_016186.3: 762-781
  source 1..19: mol_type = other RNA
aaagatctccatgaggcac

SEQ ID NO: 355 - RNA, 19 nt, synthetic construct
  misc_feature 1..19: note = Description of sequence: Description: ZPI siRNA sense strand (unmodified) corresponding positions on NM_016186.3: 1393-1412
  source 1..19: mol_type = other RNA
ctggtggtcctcatggaga

SEQ ID NO: 356 - RNA, 19 nt, synthetic construct
  misc_feature 1..19: note = Description of sequence: Description: ZPI siRNA sense strand (unmodified) corresponding positions on NM_016186.3: 997-1016
  source 1..19: mol_type = other RNA
ttcatccacaaggattttg

SEQ ID NO: 357 - RNA, 19 nt, synthetic construct
  misc_feature 1..19: note = Description of sequence: Description: ZPI siRNA sense strand (unmodified) corresponding positions on NM_016186.3: 763-782
  source 1..19: mol_type = other RNA
aagatctccatgaggcacg

SEQ ID NO: 358 - RNA, 19 nt, synthetic construct
  misc_feature 1..19: note = Description of sequence: Description: ZPI siRNA sense strand (unmodified) corresponding positions on NM_016186.3: 999-1018
  source 1..19: mol_type = other RNA
catccacaaggattttgat

SEQ ID NO: 359 - RNA, 19 nt, synthetic construct
  misc_feature 1..19: note = Description of sequence: Description: ZPI siRNA sense strand (unmodified) corresponding positions on NM_016186.3: 1161-1180
  source 1..19: mol_type = other RNA
tgatgagattaatcctgaa

SEQ ID NO: 360 - RNA, 19 nt, synthetic construct
  misc_feature 1..19: note = Description of sequence: Description: ZPI siRNA sense strand (unmodified) corresponding positions on NM_016186.3: 994-1013
  source 1..19: mol_type = other RNA
gccttcatccacaaggatt

SEQ ID NO: 361 - RNA, 19 nt, synthetic construct
  misc_feature 1..19: note = Description of sequence: Description: ZPI siRNA sense strand (unmodified) corresponding positions on NM_016186.3: 767-786
  source 1..19: mol_type = other RNA
tctccatgaggcacgatgg

SEQ ID NO: 362 - RNA, 23 nt, synthetic construct
  source 1..23: mol_type = other RNA
  misc_feature 1..23: note = Antisense: ETXS632; corresponding to SEQ ID NO: 122
  modified_base 1: mod_base = OTHER; note = 2'O-methyl-adenosine
  modified_base 2: mod_base = OTHER; note = 2'Fluoro-adenosine
  modified_base 3: mod_base = OTHER; note = 2'O-methyl-adenosine
  modified_base 4: mod_base = um
  modified_base 5: mod_base = cm
  modified_base 6: mod_base = OTHER; note = 2' Fluoro-cytidine
  modified_base 7: mod_base = um
  modified_base 8: mod_base = OTHER; note = 2' Fluoro-uridine
  modified_base 9: mod_base = OTHER; note = 2' Fluoro-guanosine
  modified_base 10: mod_base = um
  modified_base 11: mod_base = gm
  modified_base 12: mod_base = gm
  modified_base 13: mod_base = OTHER; note = 2'O-methyl-adenosine
  modified_base 14: mod_base = OTHER; note = 2' Fluoro-uridine
  modified_base 15: mod_base = gm
  modified_base 16: mod_base = OTHER; note = 2'Fluoro-adenosine
  modified_base 17: mod_base = OTHER; note = 2'O-methyl-adenosine
  modified_base 18: mod_base = gm
  modified_base 19: mod_base = gm
  modified_base 20: mod_base = cm
  modified_base 21: mod_base = OTHER; note = 2'O-methyl-adenosine
  modified_base 22: mod_base = OTHER; note = 2'O-methyl-adenosine
  modified_base 23: mod_base = OTHER; note = 2'O-methyl-adenosine
  misc_feature 1^2: note = phosphorothioate linkage
  misc_feature 2^3: note = phosphorothioate linkage
  misc_feature 21^22: note = phosphorothioate linkage
  misc_feature 22^23: note = phosphorothioate linkage
aaatccttgtggatgaaggcaaa

SEQ ID NO: 363 - RNA, 23 nt, synthetic construct
  source 1..23: mol_type = other RNA
  misc_feature 1..23: note = Antisense: ETXS634; corresponding to SEQ ID NO: 123
  modified_base 1: mod_base = gm
  modified_base 2: mod_base = OTHER; note = 2' Fluoro-cytidine
  modified_base 3: mod_base = cm
  modified_base 4: mod_base = um
  modified_base 5: mod_base = cm
  modified_base 6: mod_base = OTHER; note = 2'Fluoro-adenosine
  modified_base 7: mod_base = um
  modified_base 8: mod_base = OTHER; note = 2' Fluoro-guanosine
  modified_base 9: mod_base = OTHER; note = 2' Fluoro-guanosine
  modified_base 10: mod_base = OTHER; note = 2'O-methyl-adenosine
  modified_base 11: mod_base = gm
  modified_base 12: mod_base = OTHER; note = 2'O-methyl-adenosine
  modified_base 13: mod_base = um
  modified_base 14: mod_base = OTHER; note = 2' Fluoro-cytidine
  modified_base 15: mod_base = um
  modified_base 16: mod_base = OTHER; note = 2' Fluoro-uridine
  modified_base 17: mod_base = um
  modified_base 18: mod_base = cm
  modified_base 19: mod_base = gm
  modified_base 20: mod_base = cm
  modified_base 21: mod_base = OTHER; note = 2'O-methyl-adenosine
  modified_base 22: mod_base = gm
  modified_base 23: mod_base = cm
  misc_feature 1^2: note = phosphorothioate linkage
  misc_feature 2^3: note = phosphorothioate linkage
  misc_feature 21^22: note = phosphorothioate linkage
  misc_feature 22^23: note = phosphorothioate linkage
gcctcatggagatctttcgcagc

SEQ ID NO: 364 - RNA, 23 nt, synthetic construct
  source 1..23: mol_type = other RNA
  misc_feature 1..23: note = Antisense: ETXS636; corresponding to SEQ ID NO: 124
  modified_base 1: mod_base = um
  modified_base 2: mod_base = OTHER; note = 2' Fluoro-uridine
  modified_base 3: mod_base = cm
  modified_base 4: mod_base = um
  modified_base 5: mod_base = cm
  modified_base 6: mod_base = OTHER; note = 2' Fluoro-cytidine
  modified_base 7: mod_base = OTHER; note = 2'O-methyl-adenosine
  modified_base 8: mod_base = OTHER; note = 2' Fluoro-uridine
  modified_base 9: mod_base = OTHER; note = 2' Fluoro-guanosine
  modified_base 10: mod_base = OTHER; note = 2'O-methyl-adenosine
  modified_base 11: mod_base = gm
  modified_base 12: mod_base = gm
  modified_base 13: mod_base = OTHER; note = 2'O-methyl-adenosine
  modified_base 14: mod_base = OTHER; note = 2' Fluoro-cytidine
  modified_base 15: mod_base = cm
  modified_base 16: mod_base = OTHER; note = 2'Fluoro-adenosine
  modified_base 17: mod_base = cm
  modified_base 18: mod_base = cm
  modified_base 19: mod_base = OTHER; note = 2'O-methyl-adenosine
  modified_base 20: mod_base = gm
  modified_base 21: mod_base = cm
  modified_base 22: mod_base = OTHER; note = 2'O-methyl-adenosine
  modified_base 23: mod_base = um
  misc_feature 1^2: note = phosphorothioate linkage
  misc_feature 2^3: note = phosphorothioate linkage
  misc_feature 21^22: note = phosphorothioate linkage
  misc_feature 22^23: note = phosphorothioate linkage
ttctccatgaggaccaccagcat

SEQ ID NO: 365 - RNA, 23 nt, synthetic construct
  source 1..23: mol_type = other RNA
  misc_feature 1..23: note = Antisense: ETXS638; corresponding to SEQ ID NO: 125
  modified_base 1: mod_base = um
  modified_base 2: mod_base = OTHER; note = 2' Fluoro-guanosine
  modified_base 3: mod_base = cm
  modified_base 4: mod_base = cm
  modified_base 5: mod_base = um
  modified_base 6: mod_base = OTHER; note = 2' Fluoro-cytidine
  modified_base 7: mod_base = OTHER; note = 2'O-methyl-adenosine
  modified_base 8: mod_base = OTHER; note = 2' Fluoro-uridine
  modified_base 9: mod_base = OTHER; note = 2' Fluoro-guanosine
  modified_base 10: mod_base = gm
  modified_base 11: mod_base = OTHER; note = 2'O-methyl-adenosine
  modified_base 12: mod_base = gm
  modified_base 13: mod_base = OTHER; note = 2'O-methyl-adenosine
  modified_base 14: mod_base = OTHER; note = 2' Fluoro-uridine
  modified_base 15: mod_base = cm
  modified_base 16: mod_base = OTHER; note = 2' Fluoro-uridine
  modified_base 17: mod_base = um
  modified_base 18: mod_base = um
  modified_base 19: mod_base = cm
  modified_base 20: mod_base = gm
  modified_base 21: mod_base = cm
  modified_base 22: mod_base = OTHER; note = 2'O-methyl-adenosine
  modified_base 23: mod_base = gm
  misc_feature 1^2: note = phosphorothioate linkage
  misc_feature 2^3: note = phosphorothioate linkage
  misc_feature 21^22: note = phosphorothioate linkage
  misc_feature 22^23: note = phosphorothioate linkage
tgcctcatggagatctttcgcag

SEQ ID NO: 366 - RNA, 23 nt, synthetic construct
  source 1..23: mol_type = other RNA
  misc_feature 1..23: note = Antisense: ETXS640; corresponding to SEQ ID NO: 126
  modified_base 1: mod_base = OTHER; note = 2'O-methyl-adenosine
  modified_base 2: mod_base = OTHER; note = 2' Fluoro-guanosine
  modified_base 3: mod_base = cm
  modified_base 4: mod_base = OTHER; note = 2'O-methyl-adenosine
  modified_base 5: mod_base = gm
  modified_base 6: mod_base = OTHER; note = 2' Fluoro-cytidine
  modified_base 7: mod_base = um
  modified_base 8: mod_base = OTHER; note = 2' Fluoro-cytidine
  modified_base 9: mod_base = OTHER; note = 2'Fluoro-adenosine
  modified_base 10: mod_base = um
  modified_base 11: mod_base = gm
  modified_base 12: mod_base = cm
  modified_base 13: mod_base = OTHER; note = 2'O-methyl-adenosine
  modified_base 14: mod_base = OTHER; note = 2' Fluoro-uridine
  modified_base 15: mod_base = cm
  modified_base 16: mod_base = OTHER; note = 2' Fluoro-uridine
  modified_base 17: mod_base = cm
  modified_base 18: mod_base = OTHER; note = 2'O-methyl-adenosine
  modified_base 19: mod_base = um
  modified_base 20: mod_base = OTHER; note = 2'O-methyl-adenosine
  modified_base 21: mod_base = cm
  modified_base 22: mod_base = um
  modified_base 23: mod_base = um
  misc_feature 1^2: note = phosphorothioate linkage
  misc_feature 2^3: note = phosphorothioate linkage
  misc_feature 21^22: note = phosphorothioate linkage
  misc_feature 22^23: note = phosphorothioate linkage
agcagctcatgcatctcatactt

SEQ ID NO: 367 - RNA, 23 nt, synthetic construct
  source 1..23: mol_type = other RNA
  misc_feature 1..23: note = Antisense: ETXS642; corresponding to SEQ ID NO: 127
  modified_base 1: mod_base = um
  modified_base 2: mod_base = OTHER; note = 2' Fluoro-cytidine
  modified_base 3: mod_base = OTHER; note = 2'O-methyl-adenosine
  modified_base 4: mod_base = gm
  modified_base 5: mod_base = gm
  modified_base 6: mod_base = OTHER; note = 2'Fluoro-adenosine
  modified_base 7: mod_base = um
  modified_base 8: mod_base = OTHER; note = 2' Fluoro-uridine
  modified_base 9: mod_base = OTHER; note = 2'Fluoro-adenosine
  modified_base 10: mod_base = OTHER; note = 2'O-methyl-adenosine
  modified_base 11: mod_base = um
  modified_base 12: mod_base = cm
  modified_base 13: mod_base = um
  modified_base 14: mod_base = OTHER; note = 2' Fluoro-cytidine
  modified_base 15: mod_base = OTHER; note = 2'O-methyl-adenosine
  modified_base 16: mod_base = OTHER; note = 2' Fluoro-uridine
  modified_base 17: mod_base = cm
  modified_base 18: mod_base = OTHER; note = 2'O-methyl-adenosine
  modified_base 19: mod_base = OTHER; note = 2'O-methyl-adenosine
  modified_base 20: mod_base = OTHER; note = 2'O-methyl-adenosine
  modified_base 21: mod_base = cm
  modified_base 22: mod_base = OTHER; note = 2'O-methyl-adenosine
  modified_base 23: mod_base = gm
  misc_feature 1^2: note = phosphorothioate linkage
  misc_feature 2^3: note = phosphorothioate linkage
  misc_feature 21^22: note = phosphorothioate linkage
  misc_feature 22^23: note = phosphorothioate linkage
tcaggattaatctcatcaaacag

SEQ ID NO: 368 - RNA, 23 nt, synthetic construct
  source 1..23: mol_type = other RNA
  misc_feature 1..23: note = Antisense: ETXS644; corresponding to SEQ ID NO: 128
  modified_base 1: mod_base = um
  modified_base 2: mod_base = OTHER; note = 2' Fluoro-uridine
  modified_base 3: mod_base = gm
  modified_base 4: mod_base = gm
  modified_base 5: mod_base = um
  modified_base 6: mod_base = OTHER; note = 2' Fluoro-uridine
  modified_base 7: mod_base = um
  modified_base 8: mod_base = OTHER; note = 2' Fluoro-cytidine
  modified_base 9: mod_base = OTHER; note = 2'Fluoro-adenosine
  modified_base 10: mod_base = gm
  modified_base 11: mod_base = gm
  modified_base 12: mod_base = OTHER; note = 2'O-methyl-adenosine
  modified_base 13: mod_base = um
  modified_base 14: mod_base = OTHER; note = 2' Fluoro-uridine
  modified_base 15: mod_base = OTHER; note = 2'O-methyl-adenosine
  modified_base 16: mod_base = OTHER; note = 2'Fluoro-adenosine
  modified_base 17: mod_base = um
  modified_base 18: mod_base = cm
  modified_base 19: mod_base = um
  modified_base 20: mod_base = cm
  modified_base 21: mod_base = OTHER; note = 2'O-methyl-adenosine
  modified_base 22: mod_base = um
  modified_base 23: mod_base = cm
  misc_feature 1^2: note = phosphorothioate linkage
  misc_feature 2^3: note = phosphorothioate linkage
  misc_feature 21^22: note = phosphorothioate linkage
  misc_feature 22^23: note = phosphorothioate linkage
ttggtttcaggattaatctcatc

SEQ ID NO: 369 - RNA, 23 nt, synthetic construct
  source 1..23: mol_type = other RNA
  misc_feature 1..23: note = Antisense: ETXS646; corresponding to SEQ ID NO: 129
  modified_base 1: mod_base = gm
  modified_base 2: mod_base = OTHER; note = 2' Fluoro-uridine
  modified_base 3: mod_base = um
  modified_base 4: mod_base = um
  modified_base 5: mod_base = cm
  modified_base 6: mod_base = OTHER; note = 2'Fluoro-adenosine
  modified_base 7: mod_base = gm
  modified_base 8: mod_base = OTHER; note = 2' Fluoro-guanosine
  modified_base 9: mod_base = OTHER; note = 2'Fluoro-adenosine
  modified_base 10: mod_base = um
  modified_base 11: mod_base = um
  modified_base 12: mod_base = OTHER; note = 2'O-methyl-adenosine
  modified_base 13: mod_base = OTHER; note = 2'O-methyl-adenosine
  modified_base 14: mod_base = OTHER; note = 2' Fluoro-uridine
  modified_base 15: mod_base = cm
  modified_base 16: mod_base = OTHER; note = 2' Fluoro-uridine
  modified_base 17: mod_base = cm
  modified_base 18: mod_base = OTHER; note = 2'O-methyl-adenosine
  modified_base 19: mod_base = um
  modified_base 20: mod_base = cm
  modified_base 21: mod_base = OTHER; note = 2'O-methyl-adenosine
  modified_base 22: mod_base = OTHER; note = 2'O-methyl-adenosine
  modified_base 23: mod_base = OTHER; note = 2'O-methyl-adenosine
  misc_feature 1^2: note = phosphorothioate linkage
  misc_feature 2^3: note = phosphorothioate linkage
  misc_feature 21^22: note = phosphorothioate linkage
  misc_feature 22^23: note = phosphorothioate linkage
gtttcaggattaatctcatcaaa

SEQ ID NO: 370 - RNA, 23 nt, synthetic construct
  source 1..23: mol_type = other RNA
  misc_feature 1..23: note = Antisense: ETXS648; corresponding to SEQ ID NO: 130
  modified_base 1: mod_base = um
  modified_base 2: mod_base = OTHER; note = 2' Fluoro-guanosine
  modified_base 3: mod_base = gm
  modified_base 4: mod_base = um
  modified_base 5: mod_base = um
  modified_base 6: mod_base = OTHER; note = 2' Fluoro-uridine
  modified_base 7: mod_base = cm
  modified_base 8: mod_base = OTHER; note = 2'Fluoro-adenosine
  modified_base 9: mod_base = OTHER; note = 2' Fluoro-guanosine
  modified_base 10: mod_base = gm
  modified_base 11: mod_base = OTHER; note = 2'O-methyl-adenosine
  modified_base 12: mod_base = um
  modified_base 13: mod_base = um
  modified_base 14: mod_base = OTHER; note = 2'Fluoro-adenosine
  modified_base 15: mod_base = OTHER; note = 2'O-methyl-adenosine
  modified_base 16: mod_base = OTHER; note = 2' Fluoro-uridine
  modified_base 17: mod_base = cm
  modified_base 18: mod_base = um
  modified_base 19: mod_base = cm
  modified_base 20: mod_base = OTHER; note = 2'O-methyl-adenosine
  modified_base 21: mod_base = um
  modified_base 22: mod_base = cm
  modified_base 23: mod_base = OTHER; note = 2'O-methyl-adenosine
  misc_feature 1^2: note = phosphorothioate linkage
  misc_feature 2^3: note = phosphorothioate linkage
  misc_feature 21^22: note = phosphorothioate linkage
  misc_feature 22^23: note = phosphorothioate linkage
tggtttcaggattaatctcatca

SEQ ID NO: 371 - RNA, 23 nt, synthetic construct
  source 1..23: mol_type = other RNA
  misc_feature 1..23: note = Antisense: ETXS650; corresponding to SEQ ID NO: 131
  modified_base 1: mod_base = gm
  modified_base 2: mod_base = OTHER; note = 2' Fluoro-guanosine
  modified_base 3: mod_base = um
  modified_base 4: mod_base = um
  modified_base 5: mod_base = um
  modified_base 6: mod_base = OTHER; note = 2' Fluoro-cytidine
  modified_base 7: mod_base = OTHER; note = 2'O-methyl-adenosine
  modified_base 8: mod_base = OTHER; note = 2' Fluoro-guanosine
  modified_base 9: mod_base = OTHER; note = 2' Fluoro-guanosine
  modified_base 10: mod_base = OTHER; note = 2'O-methyl-adenosine
  modified_base 11: mod_base = um
  modified_base 12: mod_base = um
  modified_base 13: mod_base = OTHER; note = 2'O-methyl-adenosine
  modified_base 14: mod_base = OTHER; note = 2'Fluoro-adenosine
  modified_base 15: mod_base = um
  modified_base 16: mod_base = OTHER; note = 2' Fluoro-cytidine
  modified_base 17: mod_base = um
  modified_base 18: mod_base = cm
  modified_base 19: mod_base = OTHER; note = 2'O-methyl-adenosine
  modified_base 20: mod_base = um
  modified_base 21: mod_base = cm
  modified_base 22: mod_base = OTHER; note = 2'O-methyl-adenosine
  modified_base 23: mod_base = OTHER; note = 2'O-methyl-adenosine
  misc_feature 1^2: note = phosphorothioate linkage
  misc_feature 2^3: note = phosphorothioate linkage
  misc_feature 21^22: note = phosphorothioate linkage
  misc_feature 22^23: note = phosphorothioate linkage
ggtttcaggattaatctcatcaa

SEQ ID NO: 372 - RNA, 23 nt, synthetic construct
  source 1..23: mol_type = other RNA
  misc_feature 1..23: note = Antisense: ETXS652; corresponding to SEQ ID NO: 132
  modified_base 1: mod_base = OTHER; note = 2'O-methyl-adenosine
  modified_base 2: mod_base = OTHER; note = 2' Fluoro-guanosine
  modified_base 3: mod_base = gm
  modified_base 4: mod_base = OTHER; note = 2'O-methyl-adenosine
  modified_base 5: mod_base = um
  modified_base 6: mod_base = OTHER; note = 2' Fluoro-uridine
  modified_base 7: mod_base = OTHER; note = 2'O-methyl-adenosine
  modified_base 8: mod_base = OTHER; note = 2'Fluoro-adenosine
  modified_base 9: mod_base = OTHER; note = 2' Fluoro-uridine
  modified_base 10: mod_base = cm
  modified_base 11: mod_base = um
  modified_base 12: mod_base = cm
  modified_base 13: mod_base = OTHER; note = 2'O-methyl-adenosine
  modified_base 14: mod_base = OTHER; note = 2' Fluoro-uridine
  modified_base 15: mod_base = cm
  modified_base 16: mod_base = OTHER; note = 2'Fluoro-adenosine
  modified_base 17: mod_base = OTHER; note = 2'O-methyl-adenosine
  modified_base 18: mod_base = OTHER; note = 2'O-methyl-adenosine
  modified_base 19: mod_base = cm
  modified_base 20: mod_base = OTHER; note = 2'O-methyl-adenosine
  modified_base 21: mod_base = gm
  modified_base 22: mod_base = um
  modified_base 23: mod_base = um
  misc_feature 1^2: note = phosphorothioate linkage
  misc_feature 2^3: note = phosphorothioate linkage
  misc_feature 21^22: note = phosphorothioate linkage
  misc_feature 22^23: note = phosphorothioate linkage
aggattaatctcatcaaacagtt

SEQ ID NO: 373 - RNA, 23 nt, synthetic construct
  source 1..23: mol_type = other RNA
  misc_feature 1..23: note = Antisense: ETXS654; corresponding to SEQ ID NO: 133
  modified_base 1: mod_base = um
  modified_base 2: mod_base = OTHER; note = 2' Fluoro-cytidine
  modified_base 3: mod_base = cm
  modified_base 4: mod_base = um
  modified_base 5: mod_base = um
  modified_base 6: mod_base = OTHER; note = 2' Fluoro-guanosine
  modified_base 7: mod_base = um
  modified_base 8: mod_base = OTHER; note = 2' Fluoro-guanosine
  modified_base 9: mod_base = OTHER; note = 2' Fluoro-guanosine
  modified_base 10: mod_base = OTHER; note = 2'O-methyl-adenosine
  modified_base 11: mod_base = um
  modified_base 12: mod_base = gm
  modified_base 13: mod_base = OTHER; note = 2'O-methyl-adenosine
  modified_base 14: mod_base = OTHER; note = 2'Fluoro-adenosine
  modified_base 15: mod_base = gm
  modified_base 16: mod_base = OTHER; note = 2' Fluoro-guanosine
  modified_base 17: mod_base = cm
  modified_base 18: mod_base = OTHER; note = 2'O-methyl-adenosine
  modified_base 19: mod_base = OTHER; note = 2'O-methyl-adenosine
  modified_base 20: mod_base = OTHER; note = 2'O-methyl-adenosine
  modified_base 21: mod_base = OTHER; note = 2'O-methyl-adenosine
  modified_base 22: mod_base = cm
  modified_base 23: mod_base = um
  misc_feature 1^2: note = phosphorothioate linkage
  misc_feature 2^3: note = phosphorothioate linkage
  misc_feature 21^22: note = phosphorothioate linkage
  misc_feature 22^23: note = phosphorothioate linkage
tccttgtggatgaaggcaaaact

SEQ ID NO: 374 - RNA, 23 nt, synthetic construct
  source 1..23: mol_type = other RNA
  misc_feature 1..23: note = Antisense: ETXS656; corresponding to SEQ ID NO: 134
  modified_base 1: mod_base = gm
  modified_base 2: mod_base = OTHER; note = 2' Fluoro-uridine
  modified_base 3: mod_base = gm
  modified_base 4: mod_base = cm
  modified_base 5: mod_base = cm
  modified_base 6: mod_base = OTHER; note = 2' Fluoro-uridine
  modified_base 7: mod_base = cm
  modified_base 8: mod_base = OTHER; note = 2'Fluoro-adenosine
  modified_base 9: mod_base = OTHER; note = 2' Fluoro-uridine
  modified_base 10: mod_base = gm
  modified_base 11: mod_base = gm
  modified_base 12: mod_base = OTHER; note = 2'O-methyl-adenosine
  modified_base 13: mod_base = gm
  modified_base 14: mod_base = OTHER; note = 2'Fluoro-adenosine
  modified_base 15: mod_base = um
  modified_base 16: mod_base = OTHER; note = 2' Fluoro-cytidine
  modified_base 17: mod_base = um
  modified_base 18: mod_base = um
  modified_base 19: mod_base = um
  modified_base 20: mod_base = cm
  modified_base 21: mod_base = gm
  modified_base 22: mod_base = cm
  modified_base 23: mod_base = OTHER; note = 2'O-methyl-adenosine
  misc_feature 1^2: note = phosphorothioate linkage
  misc_feature 2^3: note = phosphorothioate linkage
  misc_feature 21^22: note = phosphorothioate linkage
  misc_feature 22^23: note = phosphorothioate linkage
gtgcctcatggagatctttcgca

SEQ ID NO: 375 - RNA, 23 nt, synthetic construct
  source 1..23: mol_type = other RNA
  misc_feature 1..23: note = Antisense: ETXS658; corresponding to SEQ ID NO: 135
  modified_base 1: mod_base = um
  modified_base 2: mod_base = OTHER; note = 2' Fluoro-cytidine
  modified_base 3: mod_base = um
  modified_base 4: mod_base = cm
  modified_base 5: mod_base = cm
  modified_base 6: mod_base = OTHER; note = 2'Fluoro-adenosine
  modified_base 7: mod_base = um
  modified_base 8: mod_base = OTHER; note = 2' Fluoro-guanosine
  modified_base 9: mod_base = OTHER; note = 2'Fluoro-adenosine
  modified_base 10: mod_base = gm
  modified_base 11: mod_base = gm
  modified_base 12: mod_base = OTHER; note = 2'O-methyl-adenosine
  modified_base 13: mod_base = cm
  modified_base 14: mod_base = OTHER; note = 2' Fluoro-cytidine
  modified_base 15: mod_base = OTHER; note = 2'O-methyl-adenosine
  modified_base 16: mod_base = OTHER; note = 2' Fluoro-cytidine
  modified_base 17: mod_base = cm
  modified_base 18: mod_base = OTHER; note = 2'O-methyl-adenosine
  modified_base 19: mod_base = gm
  modified_base 20: mod_base = cm
  modified_base 21: mod_base = OTHER; note = 2'O-methyl-adenosine
  modified_base 22: mod_base = um
  modified_base 23: mod_base = gm
  misc_feature 1^2: note = phosphorothioate linkage
  misc_feature 2^3: note = phosphorothioate linkage
  misc_feature 21^22: note = phosphorothioate linkage
  misc_feature 22^23: note = phosphorothioate linkage
tctccatgaggaccaccagcatg

SEQ ID NO: 376 - RNA, 23 nt, synthetic construct
  source 1..23: mol_type = other RNA
  misc_feature 1..23: note = Antisense: ETXS660; corresponding to SEQ ID NO: 136
  modified_base 1: mod_base = cm
  modified_base 2: mod_base = OTHER; note = 2'Fluoro-adenosine
  modified_base 3: mod_base = OTHER; note = 2'O-methyl-adenosine
  modified_base 4: mod_base = OTHER; note = 2'O-methyl-adenosine
  modified_base 5: mod_base = OTHER; note = 2'O-methyl-adenosine
  modified_base 6: mod_base = OTHER; note = 2' Fluoro-uridine
  modified_base 7: mod_base = cm
  modified_base 8: mod_base = OTHER; note = 2' Fluoro-cytidine
  modified_base 9: mod_base = OTHER; note = 2' Fluoro-uridine
  modified_base 10: mod_base = um
  modified_base 11: mod_base = gm
  modified_base 12: mod_base = um
  modified_base 13: mod_base = gm
  modified_base 14: mod_base = OTHER; note = 2' Fluoro-guanosine
  modified_base 15: mod_base = OTHER; note = 2'O-methyl-adenosine
  modified_base 16: mod_base = OTHER; note = 2' Fluoro-uridine
  modified_base 17: mod_base = gm
  modified_base 18: mod_base = OTHER; note = 2'O-methyl-adenosine
  modified_base 19: mod_base = OTHER; note = 2'O-methyl-adenosine
  modified_base 20: mod_base = gm
  modified_base 21: mod_base = gm
  modified_base 22: mod_base = cm
  modified_base 23: mod_base = OTHER; note = 2'O-methyl-adenosine
  misc_feature 1^2: note = phosphorothioate linkage
  misc_feature 2^3: note = phosphorothioate linkage
  misc_feature 21^22: note = phosphorothioate linkage
  misc_feature 22^23: note = phosphorothioate linkage
caaaatccttgtggatgaaggca

SEQ ID NO: 377 - RNA, 23 nt, synthetic construct
  source 1..23: mol_type = other RNA
  misc_feature 1..23: note = Antisense: ETXS662; corresponding to SEQ ID NO: 137
  modified_base 1: mod_base = cm
  modified_base 2: mod_base = OTHER; note = 2' Fluoro-guanosine
  modified_base 3: mod_base = um
  modified_base 4: mod_base = gm
  modified_base 5: mod_base = cm
  modified_base 6: mod_base = OTHER; note = 2' Fluoro-cytidine
  modified_base 7: mod_base = um
  modified_base 8: mod_base = OTHER; note = 2' Fluoro-cytidine
  modified_base 9: mod_base = OTHER; note = 2'Fluoro-adenosine
  modified_base 10: mod_base = um
  modified_base 11: mod_base = gm
  modified_base 12: mod_base = gm
  modified_base 13: mod_base = OTHER; note = 2'O-methyl-adenosine
  modified_base 14: mod_base = OTHER; note = 2' Fluoro-guanosine
  modified_base 15: mod_base = OTHER; note = 2'O-methyl-adenosine
  modified_base 16: mod_base = OTHER; note = 2' Fluoro-uridine
  modified_base 17: mod_base = cm
  modified_base 18: mod_base = um
  modified_base 19: mod_base = um
  modified_base 20: mod_base = um
  modified_base 21: mod_base = cm
  modified_base 22: mod_base = gm
  modified_base 23: mod_base = cm
  misc_feature 1^2: note = phosphorothioate linkage
  misc_feature 2^3: note = phosphorothioate linkage
  misc_feature 21^22: note = phosphorothioate linkage
  misc_feature 22^23: note = phosphorothioate linkage
cgtgcctcatggagatctttcgc

SEQ ID NO: 378 - RNA, 23 nt, synthetic construct
  source 1..23: mol_type = other RNA
  misc_feature 1..23: note = Antisense: ETXS664; corresponding to SEQ ID NO: 138
  modified_base 1: mod_base = OTHER; note = 2'O-methyl-adenosine
  modified_base 2: mod_base = OTHER; note = 2' Fluoro-uridine
  modified_base 3: mod_base = cm
  modified_base 4: mod_base = OTHER; note = 2'O-methyl-adenosine
  modified_base 5: mod_base = OTHER; note = 2'O-methyl-adenosine
  modified_base 6: mod_base = OTHER; note = 2'Fluoro-adenosine
  modified_base 7: mod_base = OTHER; note = 2'O-methyl-adenosine
  modified_base 8: mod_base = OTHER; note = 2' Fluoro-uridine
  modified_base 9: mod_base = OTHER; note = 2' Fluoro-cytidine
  modified_base 10: mod_base = cm
  modified_base 11: mod_base = um
  modified_base 12: mod_base = um
  modified_base 13: mod_base = gm
  modified_base 14: mod_base = OTHER; note = 2' Fluoro-uridine
  modified_base 15: mod_base = gm
  modified_base 16: mod_base = OTHER; note = 2' Fluoro-guanosine
  modified_base 17: mod_base = OTHER; note = 2'O-methyl-adenosine
  modified_base 18: mod_base = um
  modified_base 19: mod_base = gm
  modified_base 20: mod_base = OTHER; note = 2'O-methyl-adenosine
  modified_base 21: mod_base = OTHER; note = 2'O-methyl-adenosine
  modified_base 22: mod_base = gm
  modified_base 23: mod_base = gm
  misc_feature 1^2: note = phosphorothioate linkage
  misc_feature 2^3: note = phosphorothioate linkage
  misc_feature 21^22: note = phosphorothioate linkage
  misc_feature 22^23: note = phosphorothioate linkage
atcaaaatccttgtggatgaagg

SEQ ID NO: 379 - RNA, 23 nt, synthetic construct
  source 1..23: mol_type = other RNA
  misc_feature 1..23: note = Antisense: ETXS666; corresponding to SEQ ID NO: 139
  modified_base 1: mod_base = um
  modified_base 2: mod_base = OTHER; note = 2' Fluoro-uridine
  modified_base 3: mod_base = cm
  modified_base 4: mod_base = OTHER; note = 2'O-methyl-adenosine
  modified_base 5: mod_base = gm
  modified_base 6: mod_base = OTHER; note = 2' Fluoro-guanosine
  modified_base 7: mod_base = OTHER; note = 2'O-methyl-adenosine
  modified_base 8: mod_base = OTHER; note = 2' Fluoro-uridine
  modified_base 9: mod_base = OTHER; note = 2' Fluoro-uridine
  modified_base 10: mod_base = OTHER; note = 2'O-methyl-adenosine
  modified_base 11: mod_base = OTHER; note = 2'O-methyl-adenosine
  modified_base 12: mod_base = um
  modified_base 13: mod_base = cm
  modified_base 14: mod_base = OTHER; note = 2' Fluoro-uridine
  modified_base 15: mod_base = cm
  modified_base 16: mod_base = OTHER; note = 2'Fluoro-adenosine
  modified_base 17: mod_base = um
  modified_base 18: mod_base = cm
  modified_base 19: mod_base = OTHER; note = 2'O-methyl-adenosine
  modified_base 20: mod_base = OTHER; note = 2'O-methyl-adenosine
  modified_base 21: mod_base = OTHER; note = 2'O-methyl-adenosine
  modified_base 22: mod_base = cm
  modified_base 23: mod_base = OTHER; note = 2'O-methyl-adenosine
  misc_feature 1^2: note = phosphorothioate linkage
  misc_feature 2^3: note = phosphorothioate linkage
  misc_feature 21^22: note = phosphorothioate linkage
  misc_feature 22^23: note = phosphorothioate linkage
ttcaggattaatctcatcaaaca

SEQ ID NO: 380 - RNA, 23 nt, synthetic construct
  source 1..23: mol_type = other RNA
  misc_feature 1..23: note = Antisense: ETXS668; corresponding to SEQ ID NO: 140
  modified_base 1: mod_base = OTHER; note = 2'O-methyl-adenosine
  modified_base 2: mod_base = OTHER; note = 2'Fluoro-adenosine
  modified_base 3: mod_base = um
  modified_base 4: mod_base = cm
  modified_base 5: mod_base = cm
  modified_base 6: mod_base = OTHER; note = 2' Fluoro-uridine
  modified_base 7: mod_base = um
  modified_base 8: mod_base = OTHER; note = 2' Fluoro-guanosine
  modified_base 9: mod_base = OTHER; note = 2' Fluoro-uridine
  modified_base 10: mod_base = gm
  modified_base 11: mod_base = gm
  modified_base 12: mod_base = OTHER; note = 2'O-methyl-adenosine
  modified_base 13: mod_base = um
  modified_base 14: mod_base = OTHER; note = 2' Fluoro-guanosine
  modified_base 15: mod_base = OTHER; note = 2'O-methyl-adenosine
  modified_base 16: mod_base = OTHER; note = 2'Fluoro-adenosine
  modified_base 17: mod_base = gm
  modified_base 18: mod_base = gm
  modified_base 19: mod_base = cm
  modified_base 20: mod_base = OTHER; note = 2'O-methyl-adenosine
  modified_base 21: mod_base = OTHER; note = 2'O-methyl-adenosine
  modified_base 22: mod_base = OTHER; note = 2'O-methyl-adenosine
  modified_base 23: mod_base = OTHER; note = 2'O-methyl-adenosine
  misc_feature 1^2: note = phosphorothioate linkage
  misc_feature 2^3: note = phosphorothioate linkage
  misc_feature 21^22: note = phosphorothioate linkage
  misc_feature 22^23: note = phosphorothioate linkage
aatccttgtggatgaaggcaaaa

SEQ ID NO: 381 - RNA, 23 nt, synthetic construct
  source 1..23: mol_type = other RNA
  misc_feature 1..23: note = Antisense: ETXS670; corresponding to SEQ ID NO: 141
  modified_base 1: mod_base = cm
  modified_base 2: mod_base = OTHER; note = 2' Fluoro-cytidine
  modified_base 3: mod_base = OTHER; note = 2'O-methyl-adenosine
  modified_base 4: mod_base = um
  modified_base 5: mod_base = cm
  modified_base 6: mod_base = OTHER; note = 2' Fluoro-guanosine
  modified_base 7: mod_base = um
  modified_base 8: mod_base = OTHER; note = 2' Fluoro-guanosine
  modified_base 9: mod_base = OTHER; note = 2' Fluoro-cytidine
  modified_base 10: mod_base = cm
  modified_base 11: mod_base = um
  modified_base 12: mod_base = cm
  modified_base 13: mod_base = OTHER; note = 2'O-methyl-adenosine
  modified_base 14: mod_base = OTHER; note = 2' Fluoro-uridine
  modified_base 15: mod_base = gm
  modified_base 16: mod_base = OTHER; note = 2' Fluoro-guanosine
  modified_base 17: mod_base = OTHER; note = 2'O-methyl-adenosine
  modified_base 18: mod_base = gm
  modified_base 19: mod_base = OTHER; note = 2'O-methyl-adenosine
  modified_base 20: mod_base = um
  modified_base 21: mod_base = cm
  modified_base 22: mod_base = um
  modified_base 23: mod_base = um
  misc_feature 1^2: note = phosphorothioate linkage
  misc_feature 2^3: note = phosphorothioate linkage
  misc_feature 21^22: note = phosphorothioate linkage
  misc_feature 22^23: note = phosphorothioate linkage
ccatcgtgcctcatggagatctt

SEQ ID NO: 382 - RNA, 23 nt, synthetic construct
  source 1..23: mol_type = other RNA
  misc_feature 1..23: note = Antisense: ETXS672; corresponding to SEQ ID NO: 142
  modified_base 1: mod_base = um
  modified_base 2: mod_base = OTHER; note = 2' Fluoro-cytidine
  modified_base 3: mod_base = cm
  modified_base 4: mod_base = OTHER; note = 2'O-methyl-adenosine
  modified_base 5: mod_base = um
  modified_base 6: mod_base = OTHER; note = 2' Fluoro-guanosine
  modified_base 7: mod_base = OTHER; note = 2'O-methyl-adenosine
  modified_base 8: mod_base = OTHER; note = 2' Fluoro-guanosine
  modified_base 9: mod_base = OTHER; note = 2' Fluoro-guanosine
  modified_base 10: mod_base = OTHER; note = 2'O-methyl-adenosine
  modified_base 11: mod_base = cm
  modified_base 12: mod_base = cm
  modified_base 13: mod_base = OTHER; note = 2'O-methyl-adenosine
  modified_base 14: mod_base = OTHER; note = 2' Fluoro-cytidine
  modified_base 15: mod_base = cm
  modified_base 16: mod_base = OTHER; note = 2'Fluoro-adenosine
  modified_base 17: mod_base = gm
  modified_base 18: mod_base = cm
  modified_base 19: mod_base = OTHER; note = 2'O-methyl-adenosine
  modified_base 20: mod_base = um
  modified_base 21: mod_base = gm
  modified_base 22: mod_base = gm
  modified_base 23: mod_base = um
  misc_feature 1^2: note = phosphorothioate linkage
  misc_feature 2^3: note = phosphorothioate linkage
  misc_feature 21^22: note = phosphorothioate linkage
  misc_feature 22^23: note = phosphorothioate linkage
tccatgaggaccaccagcatggt

SEQ ID NO: 383 - RNA, 23 nt, synthetic construct
  source 1..23: mol_type = other RNA
  misc_feature 1..23: note = Antisense: ETXS674; corresponding to SEQ ID NO: 143
  modified_base 1: mod_base = OTHER; note = 2'O-methyl-adenosine
  modified_base 2: mod_base = OTHER; note = 2' Fluoro-uridine
  modified_base 3: mod_base = cm
  modified_base 4: mod_base = cm
  modified_base 5: mod_base = um
  modified_base 6: mod_base = OTHER; note = 2' Fluoro-uridine
  modified_base 7: mod_base = gm
  modified_base 8: mod_base = OTHER; note = 2' Fluoro-uridine
  modified_base 9: mod_base = OTHER; note = 2' Fluoro-guanosine
  modified_base 10: mod_base = gm
  modified_base 11: mod_base = OTHER; note = 2'O-methyl-adenosine
  modified_base 12: mod_base = um
  modified_base 13: mod_base = gm
  modified_base 14: mod_base = OTHER; note = 2'Fluoro-adenosine
  modified_base 15: mod_base = OTHER; note = 2'O-methyl-adenosine
  modified_base 16: mod_base = OTHER; note = 2' Fluoro-guanosine
  modified_base 17: mod_base = gm
  modified_base 18: mod_base = cm
  modified_base 19: mod_base = OTHER; note = 2'O-methyl-adenosine
  modified_base 20: mod_base = OTHER; note = 2'O-methyl-adenosine
  modified_base 21: mod_base = OTHER; note = 2'O-methyl-adenosine
  modified_base 22: mod_base = OTHER; note = 2'O-methyl-adenosine
  modified_base 23: mod_base = cm
  misc_feature 1^2: note = phosphorothioate linkage
  misc_feature 2^3: note = phosphorothioate linkage
  misc_feature 21^22: note = phosphorothioate linkage
  misc_feature 22^23: note = phosphorothioate linkage
atccttgtggatgaaggcaaaac

SEQ ID NO: 384 - RNA, 23 nt, synthetic construct
  source 1..23: mol_type = other RNA
  misc_feature 1..23: note = Antisense: ETXS676; corresponding to SEQ ID NO: 144
  modified_base 1: mod_base = OTHER; note = 2'O-methyl-adenosine
  modified_base 2: mod_base = OTHER; note = 2'Fluoro-adenosine
  modified_base 3: mod_base = OTHER; note = 2'O-methyl-adenosine
  modified_base 4: mod_base = OTHER; note = 2'O-methyl-adenosine
  modified_base 5: mod_base = um
  modified_base 6: mod_base = OTHER; note = 2' Fluoro-cytidine
  modified_base 7: mod_base = cm
  modified_base 8: mod_base = OTHER; note = 2' Fluoro-uridine
  modified_base 9: mod_base = OTHER; note = 2' Fluoro-uridine
  modified_base 10: mod_base = gm
  modified_base 11: mod_base = um
  modified_base 12: mod_base = gm
  modified_base 13: mod_base = gm
  modified_base 14: mod_base = OTHER; note = 2'Fluoro-adenosine
  modified_base 15: mod_base = um
  modified_base 16: mod_base = OTHER; note = 2' Fluoro-guanosine
  modified_base 17: mod_base = OTHER; note = 2'O-methyl-adenosine
  modified_base 18: mod_base = OTHER; note = 2'O-methyl-adenosine
  modified_base 19: mod_base = gm
  modified_base 20: mod_base = gm
  modified_base 21: mod_base = cm
  modified_base 22: mod_base = OTHER; note = 2'O-methyl-adenosine
  modified_base 23: mod_base = OTHER; note = 2'O-methyl-adenosine
  misc_feature 1^2: note = phosphorothioate linkage
  misc_feature 2^3: note = phosphorothioate linkage
  misc_feature 21^22: note = phosphorothioate linkage
  misc_feature 22^23: note = phosphorothioate linkage
aaaatccttgtggatgaaggcaa

SEQ ID NO: 385 - RNA, 23 nt, synthetic construct
  source 1..23: mol_type = other RNA
  misc_feature 1..23: note = Antisense: ETXS678; corresponding to SEQ ID NO: 145
  modified_base 1: mod_base = cm
  modified_base 2: mod_base = OTHER; note = 2'Fluoro-adenosine
  modified_base 3: mod_base = um
  modified_base 4: mod_base = gm
  modified_base 5: mod_base = gm
  modified_base 6: mod_base = OTHER; note = 2' Fluoro-uridine
  modified_base 7: mod_base = gm
  modified_base 8: mod_base = OTHER; note = 2' Fluoro-guanosine
  modified_base 9: mod_base = OTHER; note = 2' Fluoro-cytidine
  modified_base 10: mod_base = OTHER; note = 2'O-methyl-adenosine
  modified_base 11: mod_base = um
  modified_base 12: mod_base = um
  modified_base 13: mod_base = um
  modified_base 14: mod_base = OTHER; note = 2' Fluoro-cytidine
  modified_base 15: mod_base = cm
  modified_base 16: mod_base = OTHER; note = 2' Fluoro-uridine
  modified_base 17: mod_base = um
  modified_base 18: mod_base = gm
  modified_base 19: mod_base = gm
  modified_base 20: mod_base = um
  modified_base 21: mod_base = OTHER; note = 2'O-methyl-adenosine
  modified_base 22: mod_base = gm
  modified_base 23: mod_base = gm
  misc_feature 1^2: note = phosphorothioate linkage
  misc_feature 2^3: note = phosphorothioate linkage
  misc_feature 21^22: note = phosphorothioate linkage
  misc_feature 22^23: note = phosphorothioate linkage
catggtggcatttccttggtagg

SEQ ID NO: 386 - RNA, 23 nt, synthetic construct
  source 1..23: mol_type = other RNA
  misc_feature 1..23: note = Antisense: ETXS680; corresponding to SEQ ID NO: 146
  modified_base 1: mod_base = um
  modified_base 2: mod_base = OTHER; note = 2' Fluoro-uridine
  modified_base 3: mod_base = um
  modified_base 4: mod_base = cm
  modified_base 5: mod_base = OTHER; note = 2'O-methyl-adenosine
  modified_base 6: mod_base = OTHER; note = 2' Fluoro-guanosine
  modified_base 7: mod_base = gm
  modified_base 8: mod_base = OTHER; note = 2'Fluoro-adenosine
  modified_base 9: mod_base = OTHER; note = 2' Fluoro-uridine
  modified_base 10: mod_base = um
  modified_base 11: mod_base = OTHER; note = 2'O-methyl-adenosine
  modified_base 12: mod_base = OTHER; note = 2'O-methyl-adenosine
  modified_base 13: mod_base = um
  modified_base 14: mod_base = OTHER; note = 2' Fluoro-cytidine
  modified_base 15: mod_base = um
  modified_base 16: mod_base = OTHER; note = 2' Fluoro-cytidine
  modified_base 17: mod_base = OTHER; note = 2'O-methyl-adenosine
  modified_base 18: mod_base = um
  modified_base 19: mod_base = cm
  modified_base 20: mod_base = OTHER; note = 2'O-methyl-adenosine
  modified_base 21: mod_base = OTHER; note = 2'O-methyl-adenosine
  modified_base 22: mod_base = OTHER; note = 2'O-methyl-adenosine
  modified_base 23: mod_base = cm
  misc_feature 1^2: note = phosphorothioate linkage
  misc_feature 2^3: note = phosphorothioate linkage
  misc_feature 21^22: note = phosphorothioate linkage
  misc_feature 22^23: note = phosphorothioate linkage
tttcaggattaatctcatcaaac

SEQ ID NO: 387 - RNA, 23 nt, synthetic construct
  source 1..23: mol_type = other RNA
  misc_feature 1..23: note = Antisense: ETXS682; corresponding to SEQ ID NO: 147
  modified_base 1: mod_base = um
  modified_base 2: mod_base = OTHER; note = 2' Fluoro-cytidine
  modified_base 3: mod_base = OTHER; note = 2'O-methyl-adenosine
  modified_base 4: mod_base = OTHER; note = 2'O-methyl-adenosine
  modified_base 5: mod_base = OTHER; note = 2'O-methyl-adenosine
  modified_base 6: mod_base = OTHER; note = 2'Fluoro-adenosine
  modified_base 7: mod_base = um
  modified_base 8: mod_base = OTHER; note = 2' Fluoro-cytidine
  modified_base 9: mod_base = OTHER; note = 2' Fluoro-cytidine
  modified_base 10: mod_base = um
  modified_base 11: mod_base = um
  modified_base 12: mod_base = gm
  modified_base 13: mod_base = um
  modified_base 14: mod_base = OTHER; note = 2' Fluoro-guanosine
  modified_base 15: mod_base = gm
  modified_base 16: mod_base = OTHER; note = 2'Fluoro-adenosine
  modified_base 17: mod_base = um
  modified_base 18: mod_base = gm
  modified_base 19: mod_base = OTHER; note = 2'O-methyl-adenosine
  modified_base 20: mod_base = OTHER; note = 2'O-methyl-adenosine
  modified_base 21: mod_base = gm
  modified_base 22: mod_base = gm
  modified_base 23: mod_base = cm
  misc_feature 1^2: note = phosphorothioate linkage
  misc_feature 2^3: note = phosphorothioate linkage
  misc_feature 21^22: note = phosphorothioate linkage
  misc_feature 22^23: note = phosphorothioate linkage
tcaaaatccttgtggatgaaggc

SEQ ID NO: 388 - RNA, 23 nt, synthetic construct
  source 1..23: mol_type = other RNA
  misc_feature 1..23: note = Antisense: ETXS684; corresponding to SEQ ID NO: 148
  modified_base 1: mod_base = um
  modified_base 2: mod_base = OTHER; note = 2' Fluoro-cytidine
  modified_base 3: mod_base = gm
  modified_base 4: mod_base = um
  modified_base 5: mod_base = gm
  modified_base 6: mod_base = OTHER; note = 2' Fluoro-cytidine
  modified_base 7: mod_base = cm
  modified_base 8: mod_base = OTHER; note = 2' Fluoro-uridine
  modified_base 9: mod_base = OTHER; note = 2' Fluoro-cytidine
  modified_base 10: mod_base = OTHER; note = 2'O-methyl-adenosine
  modified_base 11: mod_base = um
  modified_base 12: mod_base = gm
  modified_base 13: mod_base = gm
  modified_base 14: mod_base = OTHER; note = 2'Fluoro-adenosine
  modified_base 15: mod_base = gm
  modified_base 16: mod_base = OTHER; note = 2'Fluoro-adenosine
  modified_base 17: mod_base = um
  modified_base 18: mod_base = cm
  modified_base 19: mod_base = um
  modified_base 20: mod_base = um
  modified_base 21: mod_base = um
  modified_base 22: mod_base = cm
  modified_base 23: mod_base = gm
  misc_feature 1^2: note = phosphorothioate linkage
  misc_feature 2^3: note = phosphorothioate linkage
  misc_feature 21^22: note = phosphorothioate linkage
  misc_feature 22^23: note = phosphorothioate linkage
tcgtgcctcatggagatctttcg

SEQ ID NO: 389 - RNA, 23 nt, synthetic construct
  source 1..23: mol_type = other RNA
  misc_feature 1..23: note = Antisense: ETXS686; corresponding to SEQ ID NO: 149
  modified_base 1: mod_base = cm
  modified_base 2: mod_base = OTHER; note = 2'Fluoro-adenosine
  modified_base 3: mod_base = gm
  modified_base 4: mod_base = gm
  modified_base 5: mod_base = OTHER; note = 2'O-methyl-adenosine
  modified_base 6: mod_base = OTHER; note = 2' Fluoro-uridine
  modified_base 7: mod_base = um
  modified_base 8: mod_base = OTHER; note = 2'Fluoro-adenosine
  modified_base 9: mod_base = OTHER; note = 2'Fluoro-adenosine
  modified_base 10: mod_base = um
  modified_base 11: mod_base = cm
  modified_base 12: mod_base = um
  modified_base 13: mod_base = cm
  modified_base 14: mod_base = OTHER; note = 2'Fluoro-adenosine
  modified_base 15: mod_base = um
  modified_base 16: mod_base = OTHER; note = 2' Fluoro-cytidine
  modified_base 17: mod_base = OTHER; note = 2'O-methyl-adenosine
  modified_base 18: mod_base = OTHER; note = 2'O-methyl-adenosine
  modified_base 19: mod_base = OTHER; note = 2'O-methyl-adenosine
  modified_base 20: mod_base = cm
  modified_base 21: mod_base = OTHER; note = 2'O-methyl-adenosine
  modified_base 22: mod_base = gm
  modified_base 23: mod_base = um
  misc_feature 1^2: note = phosphorothioate linkage
  misc_feature 2^3: note = phosphorothioate linkage
  misc_feature 21^22: note = phosphorothioate linkage
  misc_feature 22^23: note = phosphorothioate linkage
caggattaatctcatcaaacagt

SEQ ID NO: 390 - RNA, 23 nt, synthetic construct
  source 1..23: mol_type = other RNA
  misc_feature 1..23: note = Antisense: ETXS688; corresponding to SEQ ID NO: 150
  modified_base 1: mod_base = cm
  modified_base 2: mod_base = OTHER; note = 2' Fluoro-uridine
  modified_base 3: mod_base = cm
  modified_base 4: mod_base = cm
  modified_base 5: mod_base = OTHER; note = 2'O-methyl-adenosine
  modified_base 6: mod_base = OTHER; note = 2' Fluoro-uridine
  modified_base 7: mod_base = gm
  modified_base 8: mod_base = OTHER; note = 2'Fluoro-adenosine
  modified_base 9: mod_base = OTHER; note = 2' Fluoro-guanosine
  modified_base 10: mod_base = gm
  modified_base 11: mod_base = OTHER; note = 2'O-methyl-adenosine
  modified_base 12: mod_base = cm
  modified_base 13: mod_base = cm
  modified_base 14: mod_base = OTHER; note = 2'Fluoro-adenosine
  modified_base 15: mod_base = cm
  modified_base 16: mod_base = OTHER; note = 2' Fluoro-cytidine
  modified_base 17: mod_base = OTHER; note = 2'O-methyl-adenosine
  modified_base 18: mod_base = gm
  modified_base 19: mod_base = cm
  modified_base 20: mod_base = OTHER; note = 2'O-methyl-adenosine
  modified_base 21: mod_base = um
  modified_base 22: mod_base = gm
  modified_base 23: mod_base = gm
  misc_feature 1^2: note = phosphorothioate linkage
  misc_feature 2^3: note = phosphorothioate linkage
  misc_feature 21^22: note = phosphorothioate linkage
  misc_feature 22^23: note = phosphorothioate linkage
ctccatgaggaccaccagcatgg

SEQ ID NO: 391 - RNA, 23 nt, synthetic construct
  source 1..23: mol_type = other RNA
  misc_feature 1..23: note = Antisense: ETXS690; corresponding to SEQ ID NO: 151
  modified_base 1: mod_base = cm
  modified_base 2: mod_base = OTHER; note = 2' Fluoro-cytidine
  modified_base 3: mod_base = um
  modified_base 4: mod_base = um
  modified_base 5: mod_base = gm
  modified_base 6: mod_base = OTHER; note = 2' Fluoro-uridine
  modified_base 7: mod_base = gm
  modified_base 8: mod_base = OTHER; note = 2' Fluoro-guanosine
  modified_base 9: mod_base = OTHER; note = 2'Fluoro-adenosine
  modified_base 10: mod_base = um
  modified_base 11: mod_base = gm
  modified_base 12: mod_base = OTHER; note = 2'O-methyl-adenosine
  modified_base 13: mod_base = OTHER; note = 2'O-methyl-adenosine
  modified_base 14: mod_base = OTHER; note = 2' Fluoro-guanosine
  modified_base 15: mod_base = gm
  modified_base 16: mod_base = OTHER; note = 2' Fluoro-cytidine
  modified_base 17: mod_base = OTHER; note = 2'O-methyl-adenosine
  modified_base 18: mod_base = OTHER; note = 2'O-methyl-adenosine
  modified_base 19: mod_base = OTHER; note = 2'O-methyl-adenosine
  modified_base 20: mod_base = OTHER; note = 2'O-methyl-adenosine
  modified_base 21: mod_base = cm
  modified_base 22: mod_base = um
  modified_base 23: mod_base = cm
  misc_feature 1^2: note = phosphorothioate linkage
  misc_feature 2^3: note = phosphorothioate linkage
  misc_feature 21^22: note = phosphorothioate linkage
  misc_feature 22^23: note = phosphorothioate linkage
ccttgtggatgaaggcaaaactc

SEQ ID NO: 392 - RNA, 23 nt, synthetic construct
  source 1..23: mol_type = other RNA
  misc_feature 1..23: note = Antisense: ETXS692; corresponding to SEQ ID NO: 152
  modified_base 1: mod_base = um
  modified_base 2: mod_base = OTHER; note = 2' Fluoro-guanosine
  modified_base 3: mod_base = OTHER; note = 2'O-methyl-adenosine
  modified_base 4: mod_base = gm
  modified_base 5: mod_base = gm
  modified_base 6: mod_base = OTHER; note = 2'Fluoro-adenosine
  modified_base 7: mod_base = cm
  modified_base 8: mod_base = OTHER; note = 2' Fluoro-cytidine
  modified_base 9: mod_base = OTHER; note = 2'Fluoro-adenosine
  modified_base 10: mod_base = cm
  modified_base 11: mod_base = cm
  modified_base 12: mod_base = OTHER; note = 2'O-methyl-adenosine
  modified_base 13: mod_base = gm
  modified_base 14: mod_base = OTHER; note = 2' Fluoro-cytidine
  modified_base 15: mod_base = OTHER; note = 2'O-methyl-adenosine
  modified_base 16: mod_base = OTHER; note = 2' Fluoro-uridine
  modified_base 17: mod_base = gm
  modified_base 18: mod_base = gm
  modified_base 19: mod_base = um
  modified_base 20: mod_base = gm
  modified_base 21: mod_base = gm
  modified_base 22: mod_base = cm
  modified_base 23: mod_base = OTHER; note = 2'O-methyl-adenosine
  misc_feature 1^2: note = phosphorothioate linkage
  misc_feature 2^3: note = phosphorothioate linkage
  misc_feature 21^22: note = phosphorothioate linkage
  misc_feature 22^23: note = phosphorothioate linkage
tgaggaccaccagcatggtggca

SEQ ID NO: 393 - RNA, 23 nt, synthetic construct
  source 1..23: mol_type = other RNA
  misc_feature 1..23: note = Antisense: ETXS694; corresponding to SEQ ID NO: 153
  modified_base 1: mod_base = OTHER; note = 2'O-methyl-adenosine
  modified_base 2: mod_base = OTHER; note = 2' Fluoro-uridine
  modified_base 3: mod_base = gm
  modified_base 4: mod_base = OTHER; note = 2'O-methyl-adenosine
  modified_base 5: mod_base = gm
  modified_base 6: mod_base = OTHER; note = 2' Fluoro-guanosine
  modified_base 7: mod_base = OTHER; note = 2'O-methyl-adenosine
  modified_base 8: mod_base = OTHER; note = 2' Fluoro-cytidine
  modified_base 9: mod_base = OTHER; note = 2' Fluoro-cytidine
  modified_base 10: mod_base = OTHER; note = 2'O-methyl-adenosine
  modified_base 11: mod_base = cm
  modified_base 12: mod_base = cm
  modified_base 13: mod_base = OTHER; note = 2'O-methyl-adenosine
  modified_base 14: mod_base = OTHER; note = 2' Fluoro-guanosine
  modified_base 15: mod_base = cm
  modified_base 16: mod_base = OTHER; note = 2'Fluoro-adenosine
  modified_base 17: mod_base = um
  modified_base 18: mod_base = gm
  modified_base 19: mod_base = gm
  modified_base 20: mod_base = um
  modified_base 21: mod_base = gm
  modified_base 22: mod_base = gm
  modified_base 23: mod_base = cm
  misc_feature 1^2: note = phosphorothioate linkage
  misc_feature 2^3: note = phosphorothioate linkage
  misc_feature 21^22: note = phosphorothioate linkage
  misc_feature 22^23: note = phosphorothioate linkage
atgaggaccaccagcatggtggc

SEQ ID NO: 394 - RNA, 23 nt, synthetic construct
  source 1..23: mol_type = other RNA
  misc_feature 1..23: note = Antisense: ETXS696; corresponding to SEQ ID NO: 154
  modified_base 1: mod_base = OTHER; note = 2'O-methyl-adenosine
  modified_base 2: mod_base = OTHER; note = 2' Fluoro-uridine
  modified_base 3: mod_base = cm
  modified_base 4: mod_base = gm
  modified_base 5: mod_base = um
  modified_base 6: mod_base = OTHER; note = 2' Fluoro-guanosine
  modified_base 7: mod_base = cm
  modified_base 8: mod_base = OTHER; note = 2' Fluoro-cytidine
  modified_base 9: mod_base = OTHER; note = 2' Fluoro-uridine
  modified_base 10: mod_base = cm
  modified_base 11: mod_base = OTHER; note = 2'O-methyl-adenosine
  modified_base 12: mod_base = um
  modified_base 13: mod_base = gm
  modified_base 14: mod_base = OTHER; note = 2' Fluoro-guanosine
  modified_base 15: mod_base = OTHER; note = 2'O-methyl-adenosine
  modified_base 16: mod_base = OTHER; note = 2' Fluoro-guanosine
  modified_base 17: mod_base = OTHER; note = 2'O-methyl-adenosine
  modified_base 18: mod_base = um
  modified_base 19: mod_base = cm
  modified_base 20: mod_base = um
  modified_base 21: mod_base = um
  modified_base 22: mod_base = um
  modified_base 23: mod_base = cm
  misc_feature 1^2: note = phosphorothioate linkage
  misc_feature 2^3: note = phosphorothioate linkage
  misc_feature 21^22: note = phosphorothioate linkage
  misc_feature 22^23: note = phosphorothioate linkage
atcgtgcctcatggagatctttc

SEQ ID NO: 395 - RNA, 23 nt, synthetic construct
  source 1..23: mol_type = other RNA
  misc_feature 1..23: note = Antisense: ETXS698; corresponding to SEQ ID NO: 155
  modified_base 1: mod_base = cm
  modified_base 2: mod_base = OTHER; note = 2' Fluoro-uridine
  modified_base 3: mod_base = um
  modified_base 4: mod_base = gm
  modified_base 5: mod_base = um
  modified_base 6: mod_base = OTHER; note = 2' Fluoro-guanosine
  modified_base 7: mod_base = gm
  modified_base 8: mod_base = OTHER; note = 2'Fluoro-adenosine
  modified_base 9: mod_base = OTHER; note = 2' Fluoro-uridine
  modified_base 10: mod_base = gm
  modified_base 11: mod_base = OTHER; note = 2'O-methyl-adenosine
  modified_base 12: mod_base = OTHER; note = 2'O-methyl-adenosine
  modified_base 13: mod_base = gm
  modified_base 14: mod_base = OTHER; note = 2' Fluoro-guanosine
  modified_base 15: mod_base = cm
  modified_base 16: mod_base = OTHER; note = 2'Fluoro-adenosine
  modified_base 17: mod_base = OTHER; note = 2'O-methyl-adenosine
  modified_base 18: mod_base = OTHER; note = 2'O-methyl-adenosine
  modified_base 19: mod_base = OTHER; note = 2'O-methyl-adenosine
  modified_base 20: mod_base = cm
  modified_base 21: mod_base = um
  modified_base 22: mod_base = cm
  modified_base 23: mod_base = cm
  misc_feature 1^2: note = phosphorothioate linkage
  misc_feature 2^3: note = phosphorothioate linkage
  misc_feature 21^22: note = phosphorothioate linkage
  misc_feature 22^23: note = phosphorothioate linkage
cttgtggatgaaggcaaaactcc

SEQ ID NO: 396 - RNA, 23 nt, synthetic construct
  source 1..23: mol_type = other RNA
  misc_feature 1..23: note = Antisense: ETXS700; corresponding to SEQ ID NO: 156
  modified_base 1: mod_base = cm
  modified_base 2: mod_base = OTHER; note = 2'Fluoro-adenosine
  modified_base 3: mod_base = um
  modified_base 4: mod_base = gm
  modified_base 5: mod_base = OTHER; note = 2'O-methyl-adenosine
  modified_base 6: mod_base = OTHER; note = 2' Fluoro-guanosine
  modified_base 7: mod_base = gm
  modified_base 8: mod_base = OTHER; note = 2'Fluoro-adenosine
  modified_base 9: mod_base = OTHER; note = 2' Fluoro-cytidine
  modified_base 10: mod_base = cm
  modified_base 11: mod_base = OTHER; note = 2'O-methyl-adenosine
  modified_base 12: mod_base = cm
  modified_base 13: mod_base = cm
  modified_base 14: mod_base = OTHER; note = 2'Fluoro-adenosine
  modified_base 15: mod_base = gm
  modified_base 16: mod_base = OTHER; note = 2' Fluoro-cytidine
  modified_base 17: mod_base = OTHER; note = 2'O-methyl-adenosine
  modified_base 18: mod_base = um
  modified_base 19: mod_base = gm
  modified_base 20: mod_base = gm
  modified_base 21: mod_base = um
  modified_base 22: mod_base = gm
  modified_base 23: mod_base = gm
  misc_feature 1^2: note = phosphorothioate linkage
  misc_feature 2^3: note = phosphorothioate linkage
  misc_feature 21^22: note = phosphorothioate linkage
  misc_feature 22^23: note = phosphorothioate linkage
catgaggaccaccagcatggtgg

SEQ ID NO: 397 - RNA, 23 nt, synthetic construct
  source 1..23: mol_type = other RNA
  misc_feature 1..23: note = Antisense: ETXS702; corresponding to SEQ ID NO: 157
  modified_base 1: mod_base = cm
  modified_base 2: mod_base = OTHER; note = 2'Fluoro-adenosine
  modified_base 3: mod_base = um
  modified_base 4: mod_base = cm
  modified_base 5: mod_base = gm
  modified_base 6: mod_base = OTHER; note = 2' Fluoro-uridine
  modified_base 7: mod_base = gm
  modified_base 8: mod_base = OTHER; note = 2' Fluoro-cytidine
  modified_base 9: mod_base = OTHER; note = 2' Fluoro-cytidine
  modified_base 10: mod_base = um
  modified_base 11: mod_base = cm
  modified_base 12: mod_base = OTHER; note = 2'O-methyl-adenosine
  modified_base 13: mod_base = um
  modified_base 14: mod_base = OTHER; note = 2' Fluoro-guanosine
  modified_base 15: mod_base = gm
  modified_base 16: mod_base = OTHER; note = 2'Fluoro-adenosine
  modified_base 17: mod_base = gm
  modified_base 18: mod_base = OTHER; note = 2'O-methyl-adenosine
  modified_base 19: mod_base = um
  modified_base 20: mod_base = cm
  modified_base 21: mod_base = um
  modified_base 22: mod_base = um
  modified_base 23: mod_base = um
  misc_feature 1^2: note = phosphorothioate linkage
  misc_feature 2^3: note = phosphorothioate linkage
  misc_feature 21^22: note = phosphorothioate linkage
  misc_feature 22^23: note = phosphorothioate linkage
catcgtgcctcatggagatcttt

SEQ ID NO: 398 - RNA, 23 nt, synthetic construct
  source 1..23: mol_type = other RNA
  misc_feature 1..23: note = Antisense: ETXS704; corresponding to SEQ ID NO: 158
  modified_base 1: mod_base = cm
  modified_base 2: mod_base = OTHER; note = 2' Fluoro-cytidine
  modified_base 3: mod_base = OTHER; note = 2'O-methyl-adenosine
  modified_base 4: mod_base = um
  modified_base 5: mod_base = gm
  modified_base 6: mod_base = OTHER; note = 2'Fluoro-adenosine
  modified_base 7: mod_base = gm
  modified_base 8: mod_base = OTHER; note = 2' Fluoro-guanosine
  modified_base 9: mod_base = OTHER; note = 2'Fluoro-adenosine
  modified_base 10: mod_base = cm
  modified_base 11: mod_base = cm
  modified_base 12: mod_base = OTHER; note = 2'O-methyl-adenosine
  modified_base 13: mod_base = cm
  modified_base 14: mod_base = OTHER; note = 2' Fluoro-cytidine
  modified_base 15: mod_base = OTHER; note = 2'O-methyl-adenosine
  modified_base 16: mod_base = OTHER; note = 2' Fluoro-guanosine
  modified_base 17: mod_base = cm
  modified_base 18: mod_base = OTHER; note = 2'O-methyl-adenosine
  modified_base 19: mod_base = um
  modified_base 20: mod_base = gm
  modified_base 21: mod_base = gm
  modified_base 22: mod_base = um
  modified_base 23: mod_base = gm
  misc_feature 1^2: note = phosphorothioate linkage
  misc_feature 2^3: note = phosphorothioate linkage
  misc_feature 21^22: note = phosphorothioate linkage
  misc_feature 22^23: note = phosphorothioate linkage
ccatgaggaccaccagcatggtg

SEQ ID NO: 399 - RNA, 23 nt, synthetic construct
  source 1..23: mol_type = other RNA
  misc_feature 1..23: note = Antisense: ETXS706; corresponding to SEQ ID NO: 159
  modified_base 1: mod_base = um
  modified_base 2: mod_base = OTHER; note = 2' Fluoro-uridine
  modified_base 3: mod_base = cm
  modified_base 4: mod_base = um
  modified_base 5: mod_base = um
  modified_base 6: mod_base = OTHER; note = 2' Fluoro-guanosine
  modified_base 7: mod_base = um
  modified_base 8: mod_base = OTHER; note = 2' Fluoro-cytidine
  modified_base 9: mod_base = OTHER; note = 2'Fluoro-adenosine
  modified_base 10: mod_base = OTHER; note = 2'O-methyl-adenosine
  modified_base 11: mod_base = OTHER; note = 2'O-methyl-adenosine
  modified_base 12: mod_base = gm
  modified_base 13: mod_base = gm
  modified_base 14: mod_base = OTHER; note = 2' Fluoro-uridine
  modified_base 15: mod_base = gm
  modified_base 16: mod_base = OTHER; note = 2' Fluoro-guanosine
  modified_base 17: mod_base = OTHER; note = 2'O-methyl-adenosine
  modified_base 18: mod_base = gm
  modified_base 19: mod_base = gm
  modified_base 20: mod_base = cm
  modified_base 21: mod_base = OTHER; note = 2'O-methyl-adenosine
  modified_base 22: mod_base = OTHER; note = 2'O-methyl-adenosine
  modified_base 23: mod_base = OTHER; note = 2'O-methyl-adenosine
  misc_feature 1^2: note = phosphorothioate linkage
  misc_feature 2^3: note = phosphorothioate linkage
  misc_feature 21^22: note = phosphorothioate linkage
  misc_feature 22^23: note = phosphorothioate linkage
ttcttgtcaaaggtggaggcaaa

SEQ ID NO: 400 - RNA, 23 nt, synthetic construct
  source 1..23: mol_type = other RNA
  misc_feature 1..23: note = Antisense: ETXS708; corresponding to SEQ ID NO: 160
  modified_base 1: mod_base = OTHER; note = 2'O-methyl-adenosine
  modified_base 2: mod_base = OTHER; note = 2'Fluoro-adenosine
  modified_base 3: mod_base = um
  modified_base 4: mod_base = um
  modified_base 5: mod_base = cm
  modified_base 6: mod_base = OTHER; note = 2' Fluoro-uridine
  modified_base 7: mod_base = um
  modified_base 8: mod_base = OTHER; note = 2' Fluoro-guanosine
  modified_base 9: mod_base = OTHER; note = 2' Fluoro-uridine
  modified_base 10: mod_base = cm
  modified_base 11: mod_base = OTHER; note = 2'O-methyl-adenosine
  modified_base 12: mod_base = OTHER; note = 2'O-methyl-adenosine
  modified_base 13: mod_base = OTHER; note = 2'O-methyl-adenosine
  modified_base 14: mod_base = OTHER; note = 2' Fluoro-guanosine
  modified_base 15: mod_base = gm
  modified_base 16: mod_base = OTHER; note = 2' Fluoro-uridine
  modified_base 17: mod_base = gm
  modified_base 18: mod_base = gm
  modified_base 19: mod_base = OTHER; note = 2'O-methyl-adenosine
  modified_base 20: mod_base = gm
  modified_base 21: mod_base = gm
  modified_base 22: mod_base = cm
  modified_base 23: mod_base = OTHER; note = 2'O-methyl-adenosine
  misc_feature 1^2: note = phosphorothioate linkage
  misc_feature 2^3: note = phosphorothioate linkage
  misc_feature 21^22: note = phosphorothioate linkage
  misc_feature 22^23: note = phosphorothioate linkage
aattcttgtcaaaggtggaggca

SEQ ID NO: 401 - RNA, 23 nt, synthetic construct
  source 1..23: mol_type = other RNA
  misc_feature 1..23: note = Antisense: ETXS710; corresponding to SEQ ID NO: 161
  modified_base 1: mod_base = um
  modified_base 2: mod_base = OTHER; note = 2'Fluoro-adenosine
  modified_base 3: mod_base = cm
  modified_base 4: mod_base = OTHER; note = 2'O-methyl-adenosine
  modified_base 5: mod_base = um
  modified_base 6: mod_base = OTHER; note = 2' Fluoro-cytidine
  modified_base 7: mod_base = OTHER; note = 2'O-methyl-adenosine
  modified_base 8: mod_base = OTHER; note = 2' Fluoro-uridine
  modified_base 9: mod_base = OTHER; note = 2' Fluoro-guanosine
  modified_base 10: mod_base = gm
  modified_base 11: mod_base = gm
  modified_base 12: mod_base = cm
  modified_base 13: mod_base = OTHER; note = 2'O-methyl-adenosine
  modified_base 14: mod_base = OTHER; note = 2' Fluoro-cytidine
  modified_base 15: mod_base = cm
  modified_base 16: mod_base = OTHER; note = 2' Fluoro-uridine
  modified_base 17: mod_base = um
  modified_base 18: mod_base = OTHER; note = 2'O-methyl-adenosine
  modified_base 19: mod_base = OTHER; note = 2'O-methyl-adenosine
  modified_base 20: mod_base = um
  modified_base 21: mod_base = gm
  modified_base 22: mod_base = gm
  modified_base 23: mod_base = um
  misc_feature 1^2: note = phosphorothioate linkage
  misc_feature 2^3: note = phosphorothioate linkage
  misc_feature 21^22: note = phosphorothioate linkage
  misc_feature 22^23: note = phosphorothioate linkage
tacatcatgggcaccttaatggt

SEQ ID NO: 402 - RNA, 23 nt, synthetic construct
  source 1..23: mol_type = other RNA
  misc_feature 1..23: note = Antisense: ETXS712; corresponding to SEQ ID NO: 162
  modified_base 1: mod_base = gm
  modified_base 2: mod_base = OTHER; note = 2' Fluoro-guanosine
  modified_base 3: mod_base = cm
  modified_base 4: mod_base = OTHER; note = 2'O-methyl-adenosine
  modified_base 5: mod_base = um
  modified_base 6: mod_base = OTHER; note = 2' Fluoro-uridine
  modified_base 7: mod_base = um
  modified_base 8: mod_base = OTHER; note = 2' Fluoro-cytidine
  modified_base 9: mod_base = OTHER; note = 2' Fluoro-cytidine
  modified_base 10: mod_base = um
  modified_base 11: mod_base = um
  modified_base 12: mod_base = gm
  modified_base 13: mod_base = gm
  modified_base 14: mod_base = OTHER; note = 2' Fluoro-uridine
  modified_base 15: mod_base = OTHER; note = 2'O-methyl-adenosine
  modified_base 16: mod_base = OTHER; note = 2' Fluoro-guanosine
  modified_base 17: mod_base = gm
  modified_base 18: mod_base = gm
  modified_base 19: mod_base = cm
  modified_base 20: mod_base = OTHER; note = 2'O-methyl-adenosine
  modified_base 21: mod_base = gm
  modified_base 22: mod_base = um
  modified_base 23: mod_base = um
  misc_feature 1^2: note = phosphorothioate linkage
  misc_feature 2^3: note = phosphorothioate linkage
  misc_feature 21^22: note = phosphorothioate linkage
  misc_feature 22^23: note = phosphorothioate linkage
ggcatttccttggtagggcagtt

SEQ ID NO: 403 - RNA, 23 nt, synthetic construct
  source 1..23: mol_type = other RNA
  misc_feature 1..23: note = Antisense: ETXS714; corresponding to SEQ ID NO: 163
  modified_base 1: mod_base = um
  modified_base 2: mod_base = OTHER; note = 2' Fluoro-uridine
  modified_base 3: mod_base = um
  modified_base 4: mod_base = cm
  modified_base 5: mod_base = cm
  modified_base 6: mod_base = OTHER; note = 2' Fluoro-uridine
  modified_base 7: mod_base = um
  modified_base 8: mod_base = OTHER; note = 2' Fluoro-guanosine
  modified_base 9: mod_base = OTHER; note = 2' Fluoro-guanosine
  modified_base 10: mod_base = um
  modified_base 11: mod_base = OTHER; note = 2'O-methyl-adenosine
  modified_base 12: mod_base = gm
  modified_base 13: mod_base = gm
  modified_base 14: mod_base = OTHER; note = 2' Fluoro-guanosine
  modified_base 15: mod_base = cm
  modified_base 16: mod_base = OTHER; note = 2'Fluoro-adenosine
  modified_base 17: mod_base = gm
  modified_base 18: mod_base = um
  modified_base 19: mod_base = um
  modified_base 20: mod_base = um
  modified_base 21: mod_base = gm
  modified_base 22: mod_base = OTHER; note = 2'O-methyl-adenosine
  modified_base 23: mod_base = gm
  misc_feature 1^2: note = phosphorothioate linkage
  misc_feature 2^3: note = phosphorothioate linkage
  misc_feature 21^22: note = phosphorothioate linkage
  misc_feature 22^23: note = phosphorothioate linkage
tttccttggtagggcagtttgag

SEQ ID NO: 404 - RNA, 23 nt, synthetic construct
  source 1..23: mol_type = other RNA
  misc_feature 1..23: note = Antisense: ETXS716; corresponding to SEQ ID NO: 164
  modified_base 1: mod_base = um
  modified_base 2: mod_base = OTHER; note = 2' Fluoro-uridine
  modified_base 3: mod_base = cm
  modified_base 4: mod_base = cm
  modified_base 5: mod_base = um
  modified_base 6: mod_base = OTHER; note = 2' Fluoro-uridine
  modified_base 7: mod_base = gm
  modified_base 8: mod_base = OTHER; note = 2' Fluoro-guanosine
  modified_base 9: mod_base = OTHER; note = 2' Fluoro-uridine
  modified_base 10: mod_base = OTHER; note = 2'O-methyl-adenosine
  modified_base 11: mod_base = gm
  modified_base 12: mod_base = gm
  modified_base 13: mod_base = gm
  modified_base 14: mod_base = OTHER; note = 2' Fluoro-cytidine
  modified_base 15: mod_base = OTHER; note = 2'O-methyl-adenosine
  modified_base 16: mod_base = OTHER; note = 2' Fluoro-guanosine
  modified_base 17: mod_base = um
  modified_base 18: mod_base = um
  modified_base 19: mod_base = um
  modified_base 20: mod_base = gm
  modified_base 21: mod_base = OTHER; note = 2'O-methyl-adenosine
  modified_base 22: mod_base = gm
  modified_base 23: mod_base = gm
  misc_feature 1^2: note = phosphorothioate linkage
  misc_feature 2^3: note = phosphorothioate linkage
  misc_feature 21^22: note = phosphorothioate linkage
  misc_feature 22^23: note = phosphorothioate linkage
ttccttggtagggcagtttgagg

SEQ ID NO: 405 - RNA, 23 nt, synthetic construct
  source 1..23: mol_type = other RNA
  misc_feature 1..23: note = Antisense: ETXS718; corresponding to SEQ ID NO: 165
  modified_base 1: mod_base = OTHER; note = 2'O-methyl-adenosine
  modified_base 2: mod_base = OTHER; note = 2'Fluoro-adenosine
  modified_base 3: mod_base = OTHER; note = 2'O-methyl-adenosine
  modified_base 4: mod_base = um
  modified_base 5: mod_base = um
  modified_base 6: mod_base = OTHER; note = 2' Fluoro-cytidine
  modified_base 7: mod_base = um
  modified_base 8: mod_base = OTHER; note = 2' Fluoro-uridine
  modified_base 9: mod_base = OTHER; note = 2' Fluoro-guanosine
  modified_base 10: mod_base = um
  modified_base 11: mod_base = cm
  modified_base 12: mod_base = OTHER; note = 2'O-methyl-adenosine
  modified_base 13: mod_base = OTHER; note = 2'O-methyl-adenosine
  modified_base 14: mod_base = OTHER; note = 2'Fluoro-adenosine
  modified_base 15: mod_base = gm
  modified_base 16: mod_base = OTHER; note = 2' Fluoro-guanosine
  modified_base 17: mod_base = um
  modified_base 18: mod_base = gm
  modified_base 19: mod_base = gm
  modified_base 20: mod_base = OTHER; note = 2'O-methyl-adenosine
  modified_base 21: mod_base = gm
  modified_base 22: mod_base = gm
  modified_base 23: mod_base = cm
  misc_feature 1^2: note = phosphorothioate linkage
  misc_feature 2^3: note = phosphorothioate linkage
  misc_feature 21^22: note = phosphorothioate linkage
  misc_feature 22^23: note = phosphorothioate linkage
aaattcttgtcaaaggtggaggc

SEQ ID NO: 406 - RNA, 23 nt, synthetic construct
  source 1..23: mol_type = other RNA
  misc_feature 1..23: note = Antisense: ETXS720; corresponding to SEQ ID NO: 166
  modified_base 1: mod_base = um
  modified_base 2: mod_base = OTHER; note = 2' Fluoro-uridine
  modified_base 3: mod_base = gm
  modified_base 4: mod_base = um
  modified_base 5: mod_base = cm
  modified_base 6: mod_base = OTHER; note = 2' Fluoro-cytidine
  modified_base 7: mod_base = OTHER; note = 2'O-methyl-adenosine
  modified_base 8: mod_base = OTHER; note = 2' Fluoro-guanosine
  modified_base 9: mod_base = OTHER; note = 2' Fluoro-guanosine
  modified_base 10: mod_base = um
  modified_base 11: mod_base = gm
  modified_base 12: mod_base = gm
  modified_base 13: mod_base = OTHER; note = 2'O-methyl-adenosine
  modified_base 14: mod_base = OTHER; note = 2'Fluoro-adenosine
  modified_base 15: mod_base = OTHER; note = 2'O-methyl-adenosine
  modified_base 16: mod_base = OTHER; note = 2' Fluoro-guanosine
  modified_base 17: mod_base = um
  modified_base 18: mod_base = gm
  modified_base 19: mod_base = um
  modified_base 20: mod_base = cm
  modified_base 21: mod_base = gm
  modified_base 22: mod_base = OTHER; note = 2'O-methyl-adenosine
  modified_base 23: mod_base = cm
  misc_feature 1^2: note = phosphorothioate linkage
  misc_feature 2^3: note = phosphorothioate linkage
  misc_feature 21^22: note = phosphorothioate linkage
  misc_feature 22^23: note = phosphorothioate linkage
ttgtccaggtggaaagtgtcgac

SEQ ID NO: 407 - RNA, 23 nt, synthetic construct
  source 1..23: mol_type = other RNA
  misc_feature 1..23: note = Antisense: ETXS722; corresponding to SEQ ID NO: 167
  modified_base 1: mod_base = gm
  modified_base 2: mod_base = OTHER; note = 2' Fluoro-uridine
  modified_base 3: mod_base = OTHER; note = 2'O-methyl-adenosine
  modified_base 4: mod_base = cm
  modified_base 5: mod_base = um
  modified_base 6: mod_base = OTHER; note = 2' Fluoro-uridine
  modified_base 7: mod_base = gm
  modified_base 8: mod_base = OTHER; note = 2' Fluoro-uridine
  modified_base 9: mod_base = OTHER; note = 2' Fluoro-cytidine
  modified_base 10: mod_base = cm
  modified_base 11: mod_base = OTHER; note = 2'O-methyl-adenosine
  modified_base 12: mod_base = gm
  modified_base 13: mod_base = gm
  modified_base 14: mod_base = OTHER; note = 2' Fluoro-uridine
  modified_base 15: mod_base = gm
  modified_base 16: mod_base = OTHER; note = 2' Fluoro-guanosine
  modified_base 17: mod_base = OTHER; note = 2'O-methyl-adenosine
  modified_base 18: mod_base = OTHER; note = 2'O-methyl-adenosine
  modified_base 19: mod_base = OTHER; note = 2'O-methyl-adenosine
  modified_base 20: mod_base = gm
  modified_base 21: mod_base = um
  modified_base 22: mod_base = gm
  modified_base 23: mod_base = um
  misc_feature 1^2: note = phosphorothioate linkage
  misc_feature 2^3: note = phosphorothioate linkage
  misc_feature 21^22: note = phosphorothioate linkage
  misc_feature 22^23: note = phosphorothioate linkage
gtacttgtccaggtggaaagtgt

SEQ ID NO: 408 - RNA, 23 nt, synthetic construct
  source 1..23: mol_type = other RNA
  misc_feature 1..23: note = Antisense: ETXS724; corresponding to SEQ ID NO: 168
  modified_base 1: mod_base = OTHER; note = 2'O-methyl-adenosine
  modified_base 2: mod_base = OTHER; note = 2' Fluoro-uridine
  modified_base 3: mod_base = um
  modified_base 4: mod_base = um
  modified_base 5: mod_base = cm
  modified_base 6: mod_base = OTHER; note = 2' Fluoro-cytidine
  modified_base 7: mod_base = um
  modified_base 8: mod_base = OTHER; note = 2' Fluoro-uridine
  modified_base 9: mod_base = OTHER; note = 2' Fluoro-guanosine
  modified_base 10: mod_base = gm
  modified_base 11: mod_base = um
  modified_base 12: mod_base = OTHER; note = 2'O-methyl-adenosine
  modified_base 13: mod_base = gm
  modified_base 14: mod_base = OTHER; note = 2' Fluoro-guanosine
  modified_base 15: mod_base = gm
  modified_base 16: mod_base = OTHER; note = 2' Fluoro-cytidine
  modified_base 17: mod_base = OTHER; note = 2'O-methyl-adenosine
  modified_base 18: mod_base = gm
  modified_base 19: mod_base = um
  modified_base 20: mod_base = um
  modified_base 21: mod_base = um
  modified_base 22: mod_base = gm
  modified_base 23: mod_base = OTHER; note = 2'O-methyl-adenosine
  misc_feature 1^2: note = phosphorothioate linkage
  misc_feature 2^3: note = phosphorothioate linkage
  misc_feature 21^22: note = phosphorothioate linkage
  misc_feature 22^23: note = phosphorothioate linkage
atttccttggtagggcagtttga

SEQ ID NO: 409 - RNA, 23 nt, synthetic construct
  source 1..23: mol_type = other RNA
  misc_feature 1..23: note = Antisense: ETXS726; corresponding to SEQ ID NO: 169
  modified_base 1: mod_base = gm
  modified_base 2: mod_base = OTHER; note = 2' Fluoro-cytidine
  modified_base 3: mod_base = OTHER; note = 2'O-methyl-adenosine
  modified_base 4: mod_base = um
  modified_base 5: mod_base = um
  modified_base 6: mod_base = OTHER; note = 2' Fluoro-uridine
  modified_base 7: mod_base = cm
  modified_base 8: mod_base = OTHER; note = 2' Fluoro-cytidine
  modified_base 9: mod_base = OTHER; note = 2' Fluoro-uridine
  modified_base 10: mod_base = um
  modified_base 11: mod_base = gm
  modified_base 12: mod_base = gm
  modified_base 13: mod_base = um
  modified_base 14: mod_base = OTHER; note = 2'Fluoro-adenosine
  modified_base 15: mod_base = gm
  modified_base 16: mod_base = OTHER; note = 2' Fluoro-guanosine
  modified_base 17: mod_base = gm
  modified_base 18: mod_base = cm
  modified_base 19: mod_base = OTHER; note = 2'O-methyl-adenosine
  modified_base 20: mod_base = gm
  modified_base 21: mod_base = um
  modified_base 22: mod_base = um
  modified_base 23: mod_base = um
  misc_feature 1^2: note = phosphorothioate linkage
  misc_feature 2^3: note = phosphorothioate linkage
  misc_feature 21^22: note = phosphorothioate linkage
  misc_feature 22^23: note = phosphorothioate linkage
gcatttccttggtagggcagttt

SEQ ID NO: 410 - RNA, 23 nt, synthetic construct
  source 1..23: mol_type = other RNA
  misc_feature 1..23: note = Antisense: ETXS728; corresponding to SEQ ID NO: 170
  modified_base 1: mod_base = um
  modified_base 2: mod_base = OTHER; note = 2'Fluoro-adenosine
  modified_base 3: mod_base = cm
  modified_base 4: mod_base = um
  modified_base 5: mod_base = um
  modified_base 6: mod_base = OTHER; note = 2' Fluoro-guanosine
  modified_base 7: mod_base = um
  modified_base 8: mod_base = OTHER; note = 2' Fluoro-cytidine
  modified_base 9: mod_base = OTHER; note = 2' Fluoro-cytidine
  modified_base 10: mod_base = OTHER; note = 2'O-methyl-adenosine
  modified_base 11: mod_base = gm
  modified_base 12: mod_base = gm
  modified_base 13: mod_base = um
  modified_base 14: mod_base = OTHER; note = 2' Fluoro-guanosine
  modified_base 15: mod_base = gm
  modified_base 16: mod_base = OTHER; note = 2'Fluoro-adenosine
  modified_base 17: mod_base = OTHER; note = 2'O-methyl-adenosine
  modified_base 18: mod_base = OTHER; note = 2'O-methyl-adenosine
  modified_base 19: mod_base = gm
  modified_base 20: mod_base = um
  modified_base 21: mod_base = gm
  modified_base 22: mod_base = um
  modified_base 23: mod_base = cm
  misc_feature 1^2: note = phosphorothioate linkage
  misc_feature 2^3: note = phosphorothioate linkage
  misc_feature 21^22: note = phosphorothioate linkage
  misc_feature 22^23: note = phosphorothioate linkage
tacttgtccaggtggaaagtgtc

SEQ ID NO: 411 - RNA, 23 nt, synthetic construct
  source 1..23: mol_type = other RNA
  misc_feature 1..23: note = Antisense: ETXS730; corresponding to SEQ ID NO: 171
  modified_base 1: mod_base = OTHER; note = 2'O-methyl-adenosine
  modified_base 2: mod_base = OTHER; note = 2' Fluoro-cytidine
  modified_base 3: mod_base = OTHER; note = 2'O-methyl-adenosine
  modified_base 4: mod_base = um
  modified_base 5: mod_base = cm
  modified_base 6: mod_base = OTHER; note = 2'Fluoro-adenosine
  modified_base 7: mod_base = um
  modified_base 8: mod_base = OTHER; note = 2' Fluoro-guanosine
  modified_base 9: mod_base = OTHER; note = 2' Fluoro-guanosine
  modified_base 10: mod_base = gm
  modified_base 11: mod_base = cm
  modified_base 12: mod_base = OTHER; note = 2'O-methyl-adenosine
  modified_base 13: mod_base = cm
  modified_base 14: mod_base = OTHER; note = 2' Fluoro-cytidine
  modified_base 15: mod_base = um
  modified_base 16: mod_base = OTHER; note = 2' Fluoro-uridine
  modified_base 17: mod_base = OTHER; note = 2'O-methyl-adenosine
  modified_base 18: mod_base = OTHER; note = 2'O-methyl-adenosine
  modified_base 19: mod_base = um
  modified_base 20: mod_base = gm
  modified_base 21: mod_base = gm
  modified_base 22: mod_base = um
  modified_base 23: mod_base = cm
  misc_feature 1^2: note = phosphorothioate linkage
  misc_feature 2^3: note = phosphorothioate linkage
  misc_feature 21^22: note = phosphorothioate linkage
  misc_feature 22^23: note = phosphorothioate linkage
acatcatgggcaccttaatggtc

SEQ ID NO: 412 - RNA, 23 nt, synthetic construct
  source 1..23: mol_type = other RNA
  misc_feature 1..23: note = Antisense: ETXS732; corresponding to SEQ ID NO: 172
  modified_base 1: mod_base = um
  modified_base 2: mod_base = OTHER; note = 2' Fluoro-cytidine
  modified_base 3: mod_base = um
  modified_base 4: mod_base = um
  modified_base 5: mod_base = gm
  modified_base 6: mod_base = OTHER; note = 2' Fluoro-uridine
  modified_base 7: mod_base = cm
  modified_base 8: mod_base = OTHER; note = 2'Fluoro-adenosine
  modified_base 9: mod_base = OTHER; note = 2'Fluoro-adenosine
  modified_base 10: mod_base = OTHER; note = 2'O-methyl-adenosine
  modified_base 11: mod_base = gm
  modified_base 12: mod_base = gm
  modified_base 13: mod_base = um
  modified_base 14: mod_base = OTHER; note = 2' Fluoro-guanosine
  modified_base 15: mod_base = gm
  modified_base 16: mod_base = OTHER; note = 2'Fluoro-adenosine
  modified_base 17: mod_base = gm
  modified_base 18: mod_base = gm
  modified_base 19: mod_base = cm
  modified_base 20: mod_base = OTHER; note = 2'O-methyl-adenosine
  modified_base 21: mod_base = OTHER; note = 2'O-methyl-adenosine
  modified_base 22: mod_base = OTHER; note = 2'O-methyl-adenosine
  modified_base 23: mod_base = cm
  misc_feature 1^2: note = phosphorothioate linkage
  misc_feature 2^3: note = phosphorothioate linkage
  misc_feature 21^22: note = phosphorothioate linkage
  misc_feature 22^23: note = phosphorothioate linkage
tcttgtcaaaggtggaggcaaac

SEQ ID NO: 413 - RNA, 23 nt, synthetic construct
  source 1..23: mol_type = other RNA
  misc_feature 1..23: note = Antisense: ETXS734; corresponding to SEQ ID NO: 173
  modified_base 1: mod_base = um
  modified_base 2: mod_base = OTHER; note = 2' Fluoro-uridine
  modified_base 3: mod_base = gm
  modified_base 4: mod_base = um
  modified_base 5: mod_base = OTHER; note = 2'O-methyl-adenosine
  modified_base 6: mod_base = OTHER; note = 2' Fluoro-cytidine
  modified_base 7: mod_base = um
  modified_base 8: mod_base = OTHER; note = 2' Fluoro-uridine
  modified_base 9: mod_base = OTHER; note = 2' Fluoro-guanosine
  modified_base 10: mod_base = um
  modified_base 11: mod_base = cm
  modified_base 12: mod_base = cm
  modified_base 13: mod_base = OTHER; note = 2'O-methyl-adenosine
  modified_base 14: mod_base = OTHER; note = 2' Fluoro-guanosine
  modified_base 15: mod_base = gm
  modified_base 16: mod_base = OTHER; note = 2' Fluoro-uridine
  modified_base 17: mod_base = gm
  modified_base 18: mod_base = gm
  modified_base 19: mod_base = OTHER; note = 2'O-methyl-adenosine
  modified_base 20: mod_base = OTHER; note = 2'O-methyl-adenosine
  modified_base 21: mod_base = OTHER; note = 2'O-methyl-adenosine
  modified_base 22: mod_base = gm
  modified_base 23: mod_base = um
  misc_feature 1^2: note = phosphorothioate linkage
  misc_feature 2^3: note = phosphorothioate linkage
  misc_feature 21^22: note = phosphorothioate linkage
  misc_feature 22^23: note = phosphorothioate linkage
ttgtacttgtccaggtggaaagt

SEQ ID NO: 414 - RNA, 23 nt, synthetic construct
  source 1..23: mol_type = other RNA
  misc_feature 1..23: note = Antisense: ETXS736; corresponding to SEQ ID NO: 174
  modified_base 1: mod_base = cm
  modified_base 2: mod_base = OTHER; note = 2' Fluoro-uridine
  modified_base 3: mod_base = um
  modified_base 4: mod_base = gm
  modified_base 5: mod_base = gm
  modified_base 6: mod_base = OTHER; note = 2' Fluoro-uridine
  modified_base 7: mod_base = OTHER; note = 2'O-methyl-adenosine
  modified_base 8: mod_base = OTHER; note = 2' Fluoro-guanosine
  modified_base 9: mod_base = OTHER; note = 2' Fluoro-guanosine
  modified_base 10: mod_base = gm
  modified_base 11: mod_base = cm
  modified_base 12: mod_base = OTHER; note = 2'O-methyl-adenosine
  modified_base 13: mod_base = gm
  modified_base 14: mod_base = OTHER; note = 2' Fluoro-uridine
  modified_base 15: mod_base = um
  modified_base 16: mod_base = OTHER; note = 2' Fluoro-uridine
  modified_base 17: mod_base = gm
  modified_base 18: mod_base = OTHER; note = 2'O-methyl-adenosine
  modified_base 19: mod_base = gm
  modified_base 20: mod_base = gm
  modified_base 21: mod_base = OTHER; note = 2'O-methyl-adenosine
  modified_base 22: mod_base = cm
  modified_base 23: mod_base = OTHER; note = 2'O-methyl-adenosine
  misc_feature 1^2: note = phosphorothioate linkage
  misc_feature 2^3: note = phosphorothioate linkage
  misc_feature 21^22: note = phosphorothioate linkage
  misc_feature 22^23: note = phosphorothioate linkage
cttggtagggcagtttgaggaca

SEQ ID NO: 415 - RNA, 23 nt, synthetic construct
  source 1..23: mol_type = other RNA
  misc_feature 1..23: note = Antisense: ETXS738; corresponding to SEQ ID NO: 175
  modified_base 1: mod_base = cm
  modified_base 2: mod_base = OTHER; note = 2'Fluoro-adenosine
  modified_base 3: mod_base = um
  modified_base 4: mod_base = um
  modified_base 5: mod_base = um
  modified_base 6: mod_base = OTHER; note = 2' Fluoro-cytidine
  modified_base 7: mod_base = cm
  modified_base 8: mod_base = OTHER; note = 2' Fluoro-uridine
  modified_base 9: mod_base = OTHER; note = 2' Fluoro-uridine
  modified_base 10: mod_base = gm
  modified_base 11: mod_base = gm
  modified_base 12: mod_base = um
  modified_base 13: mod_base = OTHER; note = 2'O-methyl-adenosine
  modified_base 14: mod_base = OTHER; note = 2' Fluoro-guanosine
  modified_base 15: mod_base = gm
  modified_base 16: mod_base = OTHER; note = 2' Fluoro-guanosine
  modified_base 17: mod_base = cm
  modified_base 18: mod_base = OTHER; note = 2'O-methyl-adenosine
  modified_base 19: mod_base = gm
  modified_base 20: mod_base = um
  modified_base 21: mod_base = um
  modified_base 22: mod_base = um
  modified_base 23: mod_base = gm
  misc_feature 1^2: note = phosphorothioate linkage
  misc_feature 2^3: note = phosphorothioate linkage
  misc_feature 21^22: note = phosphorothioate linkage
  misc_feature 22^23: note = phosphorothioate linkage
catttccttggtagggcagtttg

SEQ ID NO: 416 - RNA, 23 nt, synthetic construct
  source 1..23: mol_type = other RNA
  misc_feature 1..23: note = Antisense: ETXS740; corresponding to SEQ ID NO: 176
  modified_base 1: mod_base = cm
  modified_base 2: mod_base = OTHER; note = 2' Fluoro-cytidine
  modified_base 3: mod_base = um
  modified_base 4: mod_base = um
  modified_base 5: mod_base = gm
  modified_base 6: mod_base = OTHER; note = 2' Fluoro-guanosine
  modified_base 7: mod_base = um
  modified_base 8: mod_base = OTHER; note = 2'Fluoro-adenosine
  modified_base 9: mod_base = OTHER; note = 2' Fluoro-guanosine
  modified_base 10: mod_base = gm
  modified_base 11: mod_base = gm
  modified_base 12: mod_base = cm
  modified_base 13: mod_base = OTHER; note = 2'O-methyl-adenosine
  modified_base 14: mod_base = OTHER; note = 2' Fluoro-guanosine
  modified_base 15: mod_base = um
  modified_base 16: mod_base = OTHER; note = 2' Fluoro-uridine
  modified_base 17: mod_base = um
  modified_base 18: mod_base = gm
  modified_base 19: mod_base = OTHER; note = 2'O-methyl-adenosine
  modified_base 20: mod_base = gm
  modified_base 21: mod_base = gm
  modified_base 22: mod_base = OTHER; note = 2'O-methyl-adenosine
  modified_base 23: mod_base = cm
  misc_feature 1^2: note = phosphorothioate linkage
  misc_feature 2^3: note = phosphorothioate linkage
  misc_feature 21^22: note = phosphorothioate linkage
  misc_feature 22^23: note = phosphorothioate linkage
ccttggtagggcagtttgaggac

SEQ ID NO: 417 - RNA, 23 nt, synthetic construct
  source 1..23: mol_type = other RNA
  misc_feature 1..23: note = Antisense: ETXS742; corresponding to SEQ ID NO: 177
  modified_base 1: mod_base = um
  modified_base 2: mod_base = OTHER; note = 2' Fluoro-uridine
  modified_base 3: mod_base = gm
  modified_base 4: mod_base = gm
  modified_base 5: mod_base = um
  modified_base 6: mod_base = OTHER; note = 2'Fluoro-adenosine
  modified_base 7: mod_base = gm
  modified_base 8: mod_base = OTHER; note = 2' Fluoro-guanosine
  modified_base 9: mod_base = OTHER; note = 2' Fluoro-guanosine
  modified_base 10: mod_base = cm
  modified_base 11: mod_base = OTHER; note = 2'O-methyl-adenosine
  modified_base 12: mod_base = gm
  modified_base 13: mod_base = um
  modified_base 14: mod_base = OTHER; note = 2' Fluoro-uridine
  modified_base 15: mod_base = um
  modified_base 16: mod_base = OTHER; note = 2' Fluoro-guanosine
  modified_base 17: mod_base = OTHER; note = 2'O-methyl-adenosine
  modified_base 18: mod_base = gm
  modified_base 19: mod_base = gm
  modified_base 20: mod_base = OTHER; note = 2'O-methyl-adenosine
  modified_base 21: mod_base = cm
  modified_base 22: mod_base = OTHER; note = 2'O-methyl-adenosine
  modified_base 23: mod_base = um
  misc_feature 1^2: note = phosphorothioate linkage
  misc_feature 2^3: note = phosphorothioate linkage
  misc_feature 21^22: note = phosphorothioate linkage
  misc_feature 22^23: note = phosphorothioate linkage
ttggtagggcagtttgaggacat

SEQ ID NO: 418 - RNA, 23 nt, synthetic construct
  source 1..23: mol_type = other RNA
  misc_feature 1..23: note = Antisense: ETXS744; corresponding to SEQ ID NO: 178
  modified_base 1: mod_base = cm
  modified_base 2: mod_base = OTHER; note = 2' Fluoro-uridine
  modified_base 3: mod_base = um
  modified_base 4: mod_base = gm
  modified_base 5: mod_base = um
  modified_base 6: mod_base = OTHER; note = 2' Fluoro-cytidine
  modified_base 7: mod_base = cm
  modified_base 8: mod_base = OTHER; note = 2'Fluoro-adenosine
  modified_base 9: mod_base = OTHER; note = 2' Fluoro-guanosine
  modified_base 10: mod_base = gm
  modified_base 11: mod_base = um
  modified_base 12: mod_base = gm
  modified_base 13: mod_base = gm
  modified_base 14: mod_base = OTHER; note = 2'Fluoro-adenosine
  modified_base 15: mod_base = OTHER; note = 2'O-methyl-adenosine
  modified_base 16: mod_base = OTHER; note = 2'Fluoro-adenosine
  modified_base 17: mod_base = gm
  modified_base 18: mod_base = um
  modified_base 19: mod_base = gm
  modified_base 20: mod_base = um
  modified_base 21: mod_base = cm
  modified_base 22: mod_base = gm
  modified_base 23: mod_base = OTHER; note = 2'O-methyl-adenosine
  misc_feature 1^2: note = phosphorothioate linkage
  misc_feature 2^3: note = phosphorothioate linkage
  misc_feature 21^22: note = phosphorothioate linkage
  misc_feature 22^23: note = phosphorothioate linkage
cttgtccaggtggaaagtgtcga

SEQ ID NO: 419 - RNA, 23 nt, synthetic construct
  source 1..23: mol_type = other RNA
  misc_feature 1..23: note = Antisense: ETXS746; corresponding to SEQ ID NO: 179
  modified_base 1: mod_base = cm
  modified_base 2: mod_base = OTHER; note = 2' Fluoro-uridine
  modified_base 3: mod_base = um
  modified_base 4: mod_base = gm
  modified_base 5: mod_base = um
  modified_base 6: mod_base = OTHER; note = 2' Fluoro-cytidine
  modified_base 7: mod_base = OTHER; note = 2'O-methyl-adenosine
  modified_base 8: mod_base = OTHER; note = 2'Fluoro-adenosine
  modified_base 9: mod_base = OTHER; note = 2'Fluoro-adenosine
  modified_base 10: mod_base = gm
  modified_base 11: mod_base = gm
  modified_base 12: mod_base = um
  modified_base 13: mod_base = gm
  modified_base 14: mod_base = OTHER; note = 2' Fluoro-guanosine
  modified_base 15: mod_base = OTHER; note = 2'O-methyl-adenosine
  modified_base 16: mod_base = OTHER; note = 2' Fluoro-guanosine
  modified_base 17: mod_base = gm
  modified_base 18: mod_base = cm
  modified_base 19: mod_base = OTHER; note = 2'O-methyl-adenosine
  modified_base 20: mod_base = OTHER; note = 2'O-methyl-adenosine
  modified_base 21: mod_base = OTHER; note = 2'O-methyl-adenosine
  modified_base 22: mod_base = cm
  modified_base 23: mod_base = um
  misc_feature 1^2: note = phosphorothioate linkage
  misc_feature 2^3: note = phosphorothioate linkage
  misc_feature 21^22: note = phosphorothioate linkage
  misc_feature 22^23: note = phosphorothioate linkage
cttgtcaaaggtggaggcaaact

SEQ ID NO: 420 - RNA, 23 nt, synthetic construct
  source 1..23: mol_type = other RNA
  misc_feature 1..23: note = Antisense: ETXS748; corresponding to SEQ ID NO: 180
  modified_base 1: mod_base = OTHER; note = 2'O-methyl-adenosine
  modified_base 2: mod_base = OTHER; note = 2' Fluoro-cytidine
  modified_base 3: mod_base = um
  modified_base 4: mod_base = um
  modified_base 5: mod_base = gm
  modified_base 6: mod_base = OTHER; note = 2' Fluoro-uridine
  modified_base 7: mod_base = cm
  modified_base 8: mod_base = OTHER; note = 2' Fluoro-cytidine
  modified_base 9: mod_base = OTHER; note = 2'Fluoro-adenosine
  modified_base 10: mod_base = gm
  modified_base 11: mod_base = gm
  modified_base 12: mod_base = um
  modified_base 13: mod_base = gm
  modified_base 14: mod_base = OTHER; note = 2' Fluoro-guanosine
  modified_base 15: mod_base = OTHER; note = 2'O-methyl-adenosine
  modified_base 16: mod_base = OTHER; note = 2'Fluoro-adenosine
  modified_base 17: mod_base = OTHER; note = 2'O-methyl-adenosine
  modified_base 18: mod_base = gm
  modified_base 19: mod_base = um
  modified_base 20: mod_base = gm
  modified_base 21: mod_base = um
  modified_base 22: mod_base = cm
  modified_base 23: mod_base = gm
  misc_feature 1^2: note = phosphorothioate linkage
  misc_feature 2^3: note = phosphorothioate linkage
  misc_feature 21^22: note = phosphorothioate linkage
  misc_feature 22^23: note = phosphorothioate linkage
acttgtccaggtggaaagtgtcg

SEQ ID NO: 421 - RNA, 23 nt, synthetic construct
  source 1..23: mol_type = other RNA
  misc_feature 1..23: note = Antisense: ETXS750; corresponding to SEQ ID NO: 181
  modified_base 1: mod_base = cm
  modified_base 2: mod_base = OTHER; note = 2' Fluoro-uridine
  modified_base 3: mod_base = um
  modified_base 4: mod_base = gm
  modified_base 5: mod_base = um
  modified_base 6: mod_base = OTHER; note = 2'Fluoro-adenosine
  modified_base 7: mod_base = cm
  modified_base 8: mod_base = OTHER; note = 2' Fluoro-uridine
  modified_base 9: mod_base = OTHER; note = 2' Fluoro-uridine
  modified_base 10: mod_base = gm
  modified_base 11: mod_base = um
  modified_base 12: mod_base = cm
  modified_base 13: mod_base = cm
  modified_base 14: mod_base = OTHER; note = 2'Fluoro-adenosine
  modified_base 15: mod_base = gm
  modified_base 16: mod_base = OTHER; note = 2' Fluoro-guanosine
  modified_base 17: mod_base = um
  modified_base 18: mod_base = gm
  modified_base 19: mod_base = gm
  modified_base 20: mod_base = OTHER; note = 2'O-methyl-adenosine
  modified_base 21: mod_base = OTHER; note = 2'O-methyl-adenosine
  modified_base 22: mod_base = OTHER; note = 2'O-methyl-adenosine
  modified_base 23: mod_base = gm
  misc_feature 1^2: note = phosphorothioate linkage
  misc_feature 2^3: note = phosphorothioate linkage
  misc_feature 21^22: note = phosphorothioate linkage
  misc_feature 22^23: note = phosphorothioate linkage
cttgtacttgtccaggtggaaag

SEQ ID NO: 422 - RNA, 23 nt, synthetic construct
  source 1..23: mol_type = other RNA
  misc_feature 1..23: note = Antisense: ETXS752; corresponding to SEQ ID NO: 182
  modified_base 1: mod_base = um
  modified_base 2: mod_base = OTHER; note = 2' Fluoro-guanosine
  modified_base 3: mod_base = um
  modified_base 4: mod_base = OTHER; note = 2'O-methyl-adenosine
  modified_base 5: mod_base = cm
  modified_base 6: mod_base = OTHER; note = 2' Fluoro-uridine
  modified_base 7: mod_base = um
  modified_base 8: mod_base = OTHER; note = 2' Fluoro-guanosine
  modified_base 9: mod_base = OTHER; note = 2' Fluoro-uridine
  modified_base 10: mod_base = cm
  modified_base 11: mod_base = cm
  modified_base 12: mod_base = OTHER; note = 2'O-methyl-adenosine
  modified_base 13: mod_base = gm
  modified_base 14: mod_base = OTHER; note = 2' Fluoro-guanosine
  modified_base 15: mod_base = um
  modified_base 16: mod_base = OTHER; note = 2' Fluoro-guanosine
  modified_base 17: mod_base = gm
  modified_base 18: mod_base = OTHER; note = 2'O-methyl-adenosine
  modified_base 19: mod_base = OTHER; note = 2'O-methyl-adenosine
  modified_base 20: mod_base = OTHER; note = 2'O-methyl-adenosine
  modified_base 21: mod_base = gm
  modified_base 22: mod_base = um
  modified_base 23: mod_base = gm
  misc_feature 1^2: note = phosphorothioate linkage
  misc_feature 2^3: note = phosphorothioate linkage
  misc_feature 21^22: note = phosphorothioate linkage
  misc_feature 22^23: note = phosphorothioate linkage
tgtacttgtccaggtggaaagtg

SEQ ID NO: 423 - RNA, 23 nt, synthetic construct
  source 1..23: mol_type = other RNA
  misc_feature 1..23: note = Antisense: ETXS754; corresponding to SEQ ID NO: 183
  modified_base 1: mod_base = um
  modified_base 2: mod_base = OTHER; note = 2' Fluoro-cytidine
  modified_base 3: mod_base = cm
  modified_base 4: mod_base = um
  modified_base 5: mod_base = um
  modified_base 6: mod_base = OTHER; note = 2' Fluoro-guanosine
  modified_base 7: mod_base = gm
  modified_base 8: mod_base = OTHER; note = 2' Fluoro-uridine
  modified_base 9: mod_base = OTHER; note = 2'Fluoro-adenosine
  modified_base 10: mod_base = gm
  modified_base 11: mod_base = gm
  modified_base 12: mod_base = gm
  modified_base 13: mod_base = cm
  modified_base 14: mod_base = OTHER; note = 2'Fluoro-adenosine
  modified_base 15: mod_base = gm
  modified_base 16: mod_base = OTHER; note = 2' Fluoro-uridine
  modified_base 17: mod_base = um
  modified_base 18: mod_base = um
  modified_base 19: mod_base = gm
  modified_base 20: mod_base = OTHER; note = 2'O-methyl-adenosine
  modified_base 21: mod_base = gm
  modified_base 22: mod_base = gm
  modified_base 23: mod_base = OTHER; note = 2'O-methyl-adenosine
  misc_feature 1^2: note = phosphorothioate linkage
  misc_feature 2^3: note = phosphorothioate linkage
  misc_feature 21^22: note = phosphorothioate linkage
  misc_feature 22^23: note = phosphorothioate linkage
tccttggtagggcagtttgagga

SEQ ID NO: 424 - RNA, 23 nt, synthetic construct
  source 1..23: mol_type = other RNA
  misc_feature 1..23: note = Antisense: ETXS756; corresponding to SEQ ID NO: 184
  modified_base 1: mod_base = um
  modified_base 2: mod_base = OTHER; note = 2' Fluoro-uridine
  modified_base 3: mod_base = cm
  modified_base 4: mod_base = cm
  modified_base 5: mod_base = cm
  modified_base 6: mod_base = OTHER; note = 2' Fluoro-uridine
  modified_base 7: mod_base = um
  modified_base 8: mod_base = OTHER; note = 2' Fluoro-uridine
  modified_base 9: mod_base = OTHER; note = 2' Fluoro-guanosine
  modified_base 10: mod_base = OTHER; note = 2'O-methyl-adenosine
  modified_base 11: mod_base = OTHER; note = 2'O-methyl-adenosine
  modified_base 12: mod_base = cm
  modified_base 13: mod_base = OTHER; note = 2'O-methyl-adenosine
  modified_base 14: mod_base = OTHER; note = 2'Fluoro-adenosine
  modified_base 15: mod_base = gm
  modified_base 16: mod_base = OTHER; note = 2'Fluoro-adenosine
  modified_base 17: mod_base = um
  modified_base 18: mod_base = gm
  modified_base 19: mod_base = um
  modified_base 20: mod_base = OTHER; note = 2'O-methyl-adenosine
  modified_base 21: mod_base = OTHER; note = 2'O-methyl-adenosine
  modified_base 22: mod_base = um
  modified_base 23: mod_base = cm
  misc_feature 1^2: note = phosphorothioate linkage
  misc_feature 2^3: note = phosphorothioate linkage
  misc_feature 21^22: note = phosphorothioate linkage
  misc_feature 22^23: note = phosphorothioate linkage
ttccctttgaacaagatgtaatc

SEQ ID NO: 425 - RNA, 23 nt, synthetic construct
  source 1..23: mol_type = other RNA
  misc_feature 1..23: note = Antisense: ETXS758; corresponding to SEQ ID NO: 185
  modified_base 1: mod_base = OTHER; note = 2'O-methyl-adenosine
  modified_base 2: mod_base = OTHER; note = 2' Fluoro-guanosine
  modified_base 3: mod_base = gm
  modified_base 4: mod_base = OTHER; note = 2'O-methyl-adenosine
  modified_base 5: mod_base = cm
  modified_base 6: mod_base = OTHER; note = 2' Fluoro-cytidine
  modified_base 7: mod_base = OTHER; note = 2'O-methyl-adenosine
  modified_base 8: mod_base = OTHER; note = 2' Fluoro-cytidine
  modified_base 9: mod_base = OTHER; note = 2' Fluoro-cytidine
  modified_base 10: mod_base = OTHER; note = 2'O-methyl-adenosine
  modified_base 11: mod_base = gm
  modified_base 12: mod_base = cm
  modified_base 13: mod_base = OTHER; note = 2'O-methyl-adenosine
  modified_base 14: mod_base = OTHER; note = 2' Fluoro-uridine
  modified_base 15: mod_base = gm
  modified_base 16: mod_base = OTHER; note = 2' Fluoro-guanosine
  modified_base 17: mod_base = um
  modified_base 18: mod_base = gm
  modified_base 19: mod_base = gm
  modified_base 20: mod_base = cm
  modified_base 21: mod_base = OTHER; note = 2'O-methyl-adenosine
  modified_base 22: mod_base = um
  modified_base 23: mod_base = um
  misc_feature 1^2: note = phosphorothioate linkage
  misc_feature 2^3: note = phosphorothioate linkage
  misc_feature 21^22: note = phosphorothioate linkage
  misc_feature 22^23: note = phosphorothioate linkage
aggaccaccagcatggtggcatt

SEQ ID NO: 426 - RNA, 23 nt, synthetic construct
  source 1..23: mol_type = other RNA
  misc_feature 1..23: note = Antisense: ETXS760; corresponding to SEQ ID NO: 186
  modified_base 1: mod_base = um
  modified_base 2: mod_base = OTHER; note = 2'Fluoro-adenosine
  modified_base 3: mod_base = um
  modified_base 4: mod_base = cm
  modified_base 5: mod_base = OTHER; note = 2'O-methyl-adenosine
  modified_base 6: mod_base = OTHER; note = 2'Fluoro-adenosine
  modified_base 7: mod_base = OTHER; note = 2'O-methyl-adenosine
  modified_base 8: mod_base = OTHER; note = 2'Fluoro-adenosine
  modified_base 9: mod_base = OTHER; note = 2' Fluoro-uridine
  modified_base 10: mod_base = OTHER; note = 2'O-methyl-adenosine
  modified_base 11: mod_base = cm
  modified_base 12: mod_base = cm
  modified_base 13: mod_base = um
  modified_base 14: mod_base = OTHER; note = 2' Fluoro-cytidine
  modified_base 15: mod_base = um
  modified_base 16: mod_base = OTHER; note = 2' Fluoro-uridine
  modified_base 17: mod_base = gm
  modified_base 18: mod_base = gm
  modified_base 19: mod_base = OTHER; note = 2'O-methyl-adenosine
  modified_base 20: mod_base = um
  modified_base 21: mod_base = OTHER; note = 2'O-methyl-adenosine
  modified_base 22: mod_base = OTHER; note = 2'O-methyl-adenosine
  modified_base 23: mod_base = OTHER; note = 2'O-methyl-adenosine
  misc_feature 1^2: note = phosphorothioate linkage
  misc_feature 2^3: note = phosphorothioate linkage
  misc_feature 21^22: note = phosphorothioate linkage
  misc_feature 22^23: note = phosphorothioate linkage
tatcaaaatacctcttggataaa

SEQ ID NO: 427 - RNA, 23 nt, synthetic construct
  source 1..23: mol_type = other RNA
  misc_feature 1..23: note = Antisense: ETXS762; corresponding to SEQ ID NO: 187
  modified_base 1: mod_base = OTHER; note = 2'O-methyl-adenosine
  modified_base 2: mod_base = OTHER; note = 2' Fluoro-cytidine
  modified_base 3: mod_base = cm
  modified_base 4: mod_base = OTHER; note = 2'O-methyl-adenosine
  modified_base 5: mod_base = cm
  modified_base 6: mod_base = OTHER; note = 2' Fluoro-cytidine
  modified_base 7: mod_base = OTHER; note = 2'O-methyl-adenosine
  modified_base 8: mod_base = OTHER; note = 2' Fluoro-guanosine
  modified_base 9: mod_base = OTHER; note = 2' Fluoro-cytidine
  modified_base 10: mod_base = OTHER; note = 2'O-methyl-adenosine
  modified_base 11: mod_base = um
  modified_base 12: mod_base = gm
  modified_base 13: mod_base = gm
  modified_base 14: mod_base = OTHER; note = 2' Fluoro-uridine
  modified_base 15: mod_base = gm
  modified_base 16: mod_base = OTHER; note = 2' Fluoro-guanosine
  modified_base 17: mod_base = cm
  modified_base 18: mod_base = OTHER; note = 2'O-methyl-adenosine
  modified_base 19: mod_base = um
  modified_base 20: mod_base = um
  modified_base 21: mod_base = um
  modified_base 22: mod_base = cm
  modified_base 23: mod_base = cm
  misc_feature 1^2: note = phosphorothioate linkage
  misc_feature 2^3: note = phosphorothioate linkage
  misc_feature 21^22: note = phosphorothioate linkage
  misc_feature 22^23: note = phosphorothioate linkage
accaccagcatggtggcatttcc

SEQ ID NO: 428 - RNA, 23 nt, synthetic construct
  source 1..23: mol_type = other RNA
  misc_feature 1..23: note = Antisense: ETXS764; corresponding to SEQ ID NO: 188
  modified_base 1: mod_base = um
  modified_base 2: mod_base = OTHER; note = 2' Fluoro-cytidine
  modified_base 3: mod_base = cm
  modified_base 4: mod_base = cm
  modified_base 5: mod_base = um
  modified_base 6: mod_base = OTHER; note = 2' Fluoro-uridine
  modified_base 7: mod_base = um
  modified_base 8: mod_base = OTHER; note = 2' Fluoro-guanosine
  modified_base 9: mod_base = OTHER; note = 2'Fluoro-adenosine
  modified_base 10: mod_base = OTHER; note = 2'O-methyl-adenosine
  modified_base 11: mod_base = cm
  modified_base 12: mod_base = OTHER; note = 2'O-methyl-adenosine
  modified_base 13: mod_base = OTHER; note = 2'O-methyl-adenosine
  modified_base 14: mod_base = OTHER; note = 2' Fluoro-guanosine
  modified_base 15: mod_base = OTHER; note = 2'O-methyl-adenosine
  modified_base 16: mod_base = OTHER; note = 2' Fluoro-uridine
  modified_base 17: mod_base = gm
  modified_base 18: mod_base = um
  modified_base 19: mod_base = OTHER; note = 2'O-methyl-adenosine
  modified_base 20: mod_base = OTHER; note = 2'O-methyl-adenosine
  modified_base 21: mod_base = um
  modified_base 22: mod_base = cm
  modified_base 23: mod_base = cm
  misc_feature 1^2: note = phosphorothioate linkage
  misc_feature 2^3: note = phosphorothioate linkage
  misc_feature 21^22: note = phosphorothioate linkage
  misc_feature 22^23: note = phosphorothioate linkage
tccctttgaacaagatgtaatcc

SEQ ID NO: 429 - RNA, 23 nt, synthetic construct
  source 1..23: mol_type = other RNA
  misc_feature 1..23: note = Antisense: ETXS766; corresponding to SEQ ID NO: 189
  modified_base 1: mod_base = um
  modified_base 2: mod_base = OTHER; note = 2' Fluoro-uridine
  modified_base 3: mod_base = gm
  modified_base 4: mod_base = cm
  modified_base 5: mod_base = cm
  modified_base 6: mod_base = OTHER; note = 2'Fluoro-adenosine
  modified_base 7: mod_base = um
  modified_base 8: mod_base = OTHER; note = 2' Fluoro-cytidine
  modified_base 9: mod_base = OTHER; note = 2' Fluoro-guanosine
  modified_base 10: mod_base = um
  modified_base 11: mod_base = gm
  modified_base 12: mod_base = cm
  modified_base 13: mod_base = cm
  modified_base 14: mod_base = OTHER; note = 2' Fluoro-uridine
  modified_base 15: mod_base = cm
  modified_base 16: mod_base = OTHER; note = 2'Fluoro-adenosine
  modified_base 17: mod_base = um
  modified_base 18: mod_base = gm
  modified_base 19: mod_base = gm
  modified_base 20: mod_base = OTHER; note = 2'O-methyl-adenosine
  modified_base 21: mod_base = gm
  modified_base 22: mod_base = OTHER; note = 2'O-methyl-adenosine
  modified_base 23: mod_base = um
  misc_feature 1^2: note = phosphorothioate linkage
  misc_feature 2^3: note = phosphorothioate linkage
  misc_feature 21^22: note = phosphorothioate linkage
  misc_feature 22^23: note = phosphorothioate linkage
ttgccatcgtgcctcatggagat

SEQ ID NO: 430 - RNA, 23 nt, synthetic construct
  source 1..23: mol_type = other RNA
  misc_feature 1..23: note = Antisense: ETXS768; corresponding to SEQ ID NO: 190
  modified_base 1: mod_base = um
  modified_base 2: mod_base = OTHER; note = 2' Fluoro-uridine
  modified_base 3: mod_base = um
  modified_base 4: mod_base = gm
  modified_base 5: mod_base = OTHER; note = 2'O-methyl-adenosine
  modified_base 6: mod_base = OTHER; note = 2' Fluoro-uridine
  modified_base 7: mod_base = gm
  modified_base 8: mod_base = OTHER; note = 2'Fluoro-adenosine
  modified_base 9: mod_base = OTHER; note = 2' Fluoro-cytidine
  modified_base 10: mod_base = OTHER; note = 2'O-methyl-adenosine
  modified_base 11: mod_base = gm
  modified_base 12: mod_base = gm
  modified_base 13: mod_base = OTHER; note = 2'O-methyl-adenosine
  modified_base 14: mod_base = OTHER; note = 2' Fluoro-guanosine
  modified_base 15: mod_base = gm
  modified_base 16: mod_base = OTHER; note = 2' Fluoro-cytidine
  modified_base 17: mod_base = OTHER; note = 2'O-methyl-adenosine
  modified_base 18: mod_base = um
  modified_base 19: mod_base = gm
  modified_base 20: mod_base = gm
  modified_base 21: mod_base = OTHER; note = 2'O-methyl-adenosine
  modified_base 22: mod_base = OTHER; note = 2'O-methyl-adenosine
  modified_base 23: mod_base = um
  misc_feature 1^2: note = phosphorothioate linkage
  misc_feature 2^3: note = phosphorothioate linkage
  misc_feature 21^22: note = phosphorothioate linkage
  misc_feature 22^23: note = phosphorothioate linkage
tttgatgacaggaggcatggaat

SEQ ID NO: 431 - RNA, 23 nt, synthetic construct
  source 1..23: mol_type = other RNA
  misc_feature 1..23: note = Antisense: ETXS770; corresponding to SEQ ID NO: 191
  modified_base 1: mod_base = um
  modified_base 2: mod_base = OTHER; note = 2' Fluoro-guanosine
  modified_base 3: mod_base = OTHER; note = 2'O-methyl-adenosine
  modified_base 4: mod_base = um
  modified_base 5: mod_base = gm
  modified_base 6: mod_base = OTHER; note = 2'Fluoro-adenosine
  modified_base 7: mod_base = cm
  modified_base 8: mod_base = OTHER; note = 2'Fluoro-adenosine
  modified_base 9: mod_base = OTHER; note = 2' Fluoro-guanosine
  modified_base 10: mod_base = gm
  modified_base 11: mod_base = OTHER; note = 2'O-methyl-adenosine
  modified_base 12: mod_base = gm
  modified_base 13: mod_base = gm
  modified_base 14: mod_base = OTHER; note = 2' Fluoro-cytidine
  modified_base 15: mod_base = OTHER; note = 2'O-methyl-adenosine
  modified_base 16: mod_base = OTHER; note = 2' Fluoro-uridine
  modified_base 17: mod_base = gm
  modified_base 18: mod_base = gm
  modified_base 19: mod_base = OTHER; note = 2'O-methyl-adenosine
  modified_base 20: mod_base = OTHER; note = 2'O-methyl-adenosine
  modified_base 21: mod_base = um
  modified_base 22: mod_base = OTHER; note = 2'O-methyl-adenosine
  modified_base 23: mod_base = OTHER; note = 2'O-methyl-adenosine
  misc_feature 1^2: note = phosphorothioate linkage
  misc_feature 2^3: note = phosphorothioate linkage
  misc_feature 21^22: note = phosphorothioate linkage
  misc_feature 22^23: note = phosphorothioate linkage
tgatgacaggaggcatggaataa

SEQ ID NO: 432 - RNA, 23 nt, synthetic construct
  source 1..23: mol_type = other RNA
  misc_feature 1..23: note = Antisense: ETXS772; corresponding to SEQ ID NO: 192
  modified_base 1: mod_base = cm
  modified_base 2: mod_base = OTHER; note = 2'Fluoro-adenosine
  modified_base 3: mod_base = gm
  modified_base 4: mod_base = cm
  modified_base 5: mod_base = OTHER; note = 2'O-methyl-adenosine
  modified_base 6: mod_base = OTHER; note = 2' Fluoro-uridine
  modified_base 7: mod_base = gm
  modified_base 8: mod_base = OTHER; note = 2' Fluoro-guanosine
  modified_base 9: mod_base = OTHER; note = 2' Fluoro-uridine
  modified_base 10: mod_base = gm
  modified_base 11: mod_base = gm
  modified_base 12: mod_base = cm
  modified_base 13: mod_base = OTHER; note = 2'O-methyl-adenosine
  modified_base 14: mod_base = OTHER; note = 2' Fluoro-uridine
  modified_base 15: mod_base = um
  modified_base 16: mod_base = OTHER; note = 2' Fluoro-uridine
  modified_base 17: mod_base = cm
  modified_base 18: mod_base = cm
  modified_base 19: mod_base = um
  modified_base 20: mod_base = um
  modified_base 21: mod_base = gm
  modified_base 22: mod_base = gm
  modified_base 23: mod_base = um
  misc_feature 1^2: note = phosphorothioate linkage
  misc_feature 2^3: note = phosphorothioate linkage
  misc_feature 21^22: note = phosphorothioate linkage
  misc_feature 22^23: note = phosphorothioate linkage
cagcatggtggcatttccttggt

SEQ ID NO: 433 - RNA, 23 nt, synthetic construct
  source 1..23: mol_type = other RNA
  misc_feature 1..23: note = Antisense: ETXS774; corresponding to SEQ ID NO: 193
  modified_base 1: mod_base = um
  modified_base 2: mod_base = OTHER; note = 2' Fluoro-uridine
  modified_base 3: mod_base = um
  modified_base 4: mod_base = um
  modified_base 5: mod_base = cm
  modified_base 6: mod_base = OTHER; note = 2' Fluoro-uridine
  modified_base 7: mod_base = cm
  modified_base 8: mod_base = OTHER; note = 2' Fluoro-cytidine
  modified_base 9: mod_base = OTHER; note = 2'Fluoro-adenosine
  modified_base 10: mod_base = um
  modified_base 11: mod_base = gm
  modified_base 12: mod_base = OTHER; note = 2'O-methyl-adenosine
  modified_base 13: mod_base = gm
  modified_base 14: mod_base = OTHER; note = 2' Fluoro-guanosine
  modified_base 15: mod_base = OTHER; note = 2'O-methyl-adenosine
  modified_base 16: mod_base = OTHER; note = 2' Fluoro-cytidine
  modified_base 17: mod_base = cm
  modified_base 18: mod_base = OTHER; note = 2'O-methyl-adenosine
  modified_base 19: mod_base = cm
  modified_base 20: mod_base = cm
  modified_base 21: mod_base = OTHER; note = 2'O-methyl-adenosine
  modified_base 22: mod_base = gm
  modified_base 23: mod_base = cm
  misc_feature 1^2: note = phosphorothioate linkage
  misc_feature 2^3: note = phosphorothioate linkage
  misc_feature 21^22: note = phosphorothioate linkage
  misc_feature 22^23: note = phosphorothioate linkage
ttttctccatgaggaccaccagc

SEQ ID NO: 434 - RNA, 23 nt, synthetic construct
  source 1..23: mol_type = other RNA
  misc_feature 1..23: note = Antisense: ETXS776; corresponding to SEQ ID NO: 194
  modified_base 1: mod_base = cm
  modified_base 2: mod_base = OTHER; note = 2' Fluoro-cytidine
  modified_base 3: mod_base = OTHER; note = 2'O-methyl-adenosine
  modified_base 4: mod_base = um
  modified_base 5: mod_base = um
  modified_base 6: mod_base = OTHER; note = 2' Fluoro-uridine
  modified_base 7: mod_base = cm
  modified_base 8: mod_base = OTHER; note = 2' Fluoro-cytidine
  modified_base 9: mod_base = OTHER; note = 2' Fluoro-cytidine
  modified_base 10: mod_base = um
  modified_base 11: mod_base = um
  modified_base 12: mod_base = um
  modified_base 13: mod_base = gm
  modified_base 14: mod_base = OTHER; note = 2'Fluoro-adenosine
  modified_base 15: mod_base = OTHER; note = 2'O-methyl-adenosine
  modified_base 16: mod_base = OTHER; note = 2' Fluoro-cytidine
  modified_base 17: mod_base = OTHER; note = 2'O-methyl-adenosine
  modified_base 18: mod_base = OTHER; note = 2'O-methyl-adenosine
  modified_base 19: mod_base = gm
  modified_base 20: mod_base = OTHER; note = 2'O-methyl-adenosine
  modified_base 21: mod_base = um
  modified_base 22: mod_base = gm
  modified_base 23: mod_base = um
  misc_feature 1^2: note = phosphorothioate linkage
  misc_feature 2^3: note = phosphorothioate linkage
  misc_feature 21^22: note = phosphorothioate linkage
  misc_feature 22^23: note = phosphorothioate linkage
ccatttccctttgaacaagatgt

SEQ ID NO: 435 - RNA, 23 nt, synthetic construct
  source 1..23: mol_type = other RNA
  misc_feature 1..23: note = Antisense: ETXS778; corresponding to SEQ ID NO: 195
  modified_base 1: mod_base = cm
  modified_base 2: mod_base = OTHER; note = 2' Fluoro-cytidine
  modified_base 3: mod_base = OTHER; note = 2'O-methyl-adenosine
  modified_base 4: mod_base = gm
  modified_base 5: mod_base = cm
  modified_base 6: mod_base = OTHER; note = 2'Fluoro-adenosine
  modified_base 7: mod_base = um
  modified_base 8: mod_base = OTHER; note = 2' Fluoro-guanosine
  modified_base 9: mod_base = OTHER; note = 2' Fluoro-guanosine
  modified_base 10: mod_base = um
  modified_base 11: mod_base = gm
  modified_base 12: mod_base = gm
  modified_base 13: mod_base = cm
  modified_base 14: mod_base = OTHER; note = 2'Fluoro-adenosine
  modified_base 15: mod_base = um
  modified_base 16: mod_base = OTHER; note = 2' Fluoro-uridine
  modified_base 17: mod_base = um
  modified_base 18: mod_base = cm
  modified_base 19: mod_base = cm
  modified_base 20: mod_base = um
  modified_base 21: mod_base = um
  modified_base 22: mod_base = gm
  modified_base 23: mod_base = gm
  misc_feature 1^2: note = phosphorothioate linkage
  misc_feature 2^3: note = phosphorothioate linkage
  misc_feature 21^22: note = phosphorothioate linkage
  misc_feature 22^23: note = phosphorothioate linkage
ccagcatggtggcatttccttgg

SEQ ID NO: 436 - RNA, 23 nt, synthetic construct
  source 1..23: mol_type = other RNA
  misc_feature 1..23: note = Antisense: ETXS780; corresponding to SEQ ID NO: 196
  modified_base 1: mod_base = OTHER; note = 2'O-methyl-adenosine
  modified_base 2: mod_base = OTHER; note = 2' Fluoro-uridine
  modified_base 3: mod_base = um
  modified_base 4: mod_base = cm
  modified_base 5: mod_base = um
  modified_base 6: mod_base = OTHER; note = 2' Fluoro-uridine
  modified_base 7: mod_base = gm
  modified_base 8: mod_base = OTHER; note = 2' Fluoro-uridine
  modified_base 9: mod_base = OTHER; note = 2' Fluoro-cytidine
  modified_base 10: mod_base = OTHER; note = 2'O-methyl-adenosine
  modified_base 11: mod_base = OTHER; note = 2'O-methyl-adenosine
  modified_base 12: mod_base = OTHER; note = 2'O-methyl-adenosine
  modified_base 13: mod_base = gm
  modified_base 14: mod_base = OTHER; note = 2' Fluoro-guanosine
  modified_base 15: mod_base = um
  modified_base 16: mod_base = OTHER; note = 2' Fluoro-guanosine
  modified_base 17: mod_base = gm
  modified_base 18: mod_base = OTHER; note = 2'O-methyl-adenosine
  modified_base 19: mod_base = gm
  modified_base 20: mod_base = gm
  modified_base 21: mod_base = cm
  modified_base 22: mod_base = OTHER; note = 2'O-methyl-adenosine
  modified_base 23: mod_base = OTHER; note = 2'O-methyl-adenosine
  misc_feature 1^2: note = phosphorothioate linkage
  misc_feature 2^3: note = phosphorothioate linkage
  misc_feature 21^22: note = phosphorothioate linkage
  misc_feature 22^23: note = phosphorothioate linkage
attcttgtcaaaggtggaggcaa

SEQ ID NO: 437 - RNA, 23 nt, synthetic construct
  source 1..23: mol_type = other RNA
  misc_feature 1..23: note = Antisense: ETXS782; corresponding to SEQ ID NO: 197
  modified_base 1: mod_base = um
  modified_base 2: mod_base = OTHER; note = 2' Fluoro-uridine
  modified_base 3: mod_base = gm
  modified_base 4: mod_base = um
  modified_base 5: mod_base = gm
  modified_base 6: mod_base = OTHER; note = 2' Fluoro-guanosine
  modified_base 7: mod_base = OTHER; note = 2'O-methyl-adenosine
  modified_base 8: mod_base = OTHER; note = 2' Fluoro-uridine
  modified_base 9: mod_base = OTHER; note = 2' Fluoro-guanosine
  modified_base 10: mod_base = OTHER; note = 2'O-methyl-adenosine
  modified_base 11: mod_base = OTHER; note = 2'O-methyl-adenosine
  modified_base 12: mod_base = gm
  modified_base 13: mod_base = gm
  modified_base 14: mod_base = OTHER; note = 2' Fluoro-cytidine
  modified_base 15: mod_base = OTHER; note = 2'O-methyl-adenosine
  modified_base 16: mod_base = OTHER; note = 2'Fluoro-adenosine
  modified_base 17: mod_base = OTHER; note = 2'O-methyl-adenosine
  modified_base 18: mod_base = OTHER; note = 2'O-methyl-adenosine
  modified_base 19: mod_base = cm
  modified_base 20: mod_base = um
  modified_base 21: mod_base = cm
  modified_base 22: mod_base = cm
  modified_base 23: mod_base = cm
  misc_feature 1^2: note = phosphorothioate linkage
  misc_feature 2^3: note = phosphorothioate linkage
  misc_feature 21^22: note = phosphorothioate linkage
  misc_feature 22^23: note = phosphorothioate linkage
ttgtggatgaaggcaaaactccc

SEQ ID NO: 438 - RNA, 23 nt, synthetic construct
  source 1..23: mol_type = other RNA
  misc_feature 1..23: note = Antisense: ETXS784; corresponding to SEQ ID NO: 198
  modified_base 1: mod_base = cm
  modified_base 2: mod_base = OTHER; note = 2' Fluoro-uridine
  modified_base 3: mod_base = cm
  modified_base 4: mod_base = OTHER; note = 2'O-methyl-adenosine
  modified_base 5: mod_base = um
  modified_base 6: mod_base = OTHER; note = 2' Fluoro-guanosine
  modified_base 7: mod_base = gm
  modified_base 8: mod_base = OTHER; note = 2'Fluoro-adenosine
  modified_base 9: mod_base = OTHER; note = 2' Fluoro-guanosine
  modified_base 10: mod_base = OTHER; note = 2'O-methyl-adenosine
  modified_base 11: mod_base = um
  modified_base 12: mod_base = cm
  modified_base 13: mod_base = um
  modified_base 14: mod_base = OTHER; note = 2' Fluoro-uridine
  modified_base 15: mod_base = um
  modified_base 16: mod_base = OTHER; note = 2' Fluoro-cytidine
  modified_base 17: mod_base = gm
  modified_base 18: mod_base = cm
  modified_base 19: mod_base = OTHER; note = 2'O-methyl-adenosine
  modified_base 20: mod_base = gm
  modified_base 21: mod_base = cm
  modified_base 22: mod_base = OTHER; note = 2'O-methyl-adenosine
  modified_base 23: mod_base = gm
  misc_feature 1^2: note = phosphorothioate linkage
  misc_feature 2^3: note = phosphorothioate linkage
  misc_feature 21^22: note = phosphorothioate linkage
  misc_feature 22^23: note = phosphorothioate linkage
ctcatggagatctttcgcagcag

SEQ ID NO: 439 - RNA, 23 nt, synthetic construct
  source 1..23: mol_type = other RNA
  misc_feature 1..23: note = Antisense: ETXS786; corresponding to SEQ ID NO: 199
  modified_base 1: mod_base = um
  modified_base 2: mod_base = OTHER; note = 2' Fluoro-guanosine
  modified_base 3: mod_base = um
  modified_base 4: mod_base = cm
  modified_base 5: mod_base = OTHER; note = 2'O-methyl-adenosine
  modified_base 6: mod_base = OTHER; note = 2'Fluoro-adenosine
  modified_base 7: mod_base = OTHER; note = 2'O-methyl-adenosine
  modified_base 8: mod_base = OTHER; note = 2' Fluoro-guanosine
  modified_base 9: mod_base = OTHER; note = 2' Fluoro-guanosine
  modified_base 10: mod_base = um
  modified_base 11: mod_base = gm
  modified_base 12: mod_base = gm
  modified_base 13: mod_base = OTHER; note = 2'O-methyl-adenosine
  modified_base 14: mod_base = OTHER; note = 2' Fluoro-guanosine
  modified_base 15: mod_base = gm
  modified_base 16: mod_base = OTHER; note = 2' Fluoro-cytidine
  modified_base 17: mod_base = OTHER; note = 2'O-methyl-adenosine
  modified_base 18: mod_base = OTHER; note = 2'O-methyl-adenosine
  modified_base 19: mod_base = OTHER; note = 2'O-methyl-adenosine
  modified_base 20: mod_base = cm
  modified_base 21: mod_base = um
  modified_base 22: mod_base = um
  modified_base 23: mod_base = gm
  misc_feature 1^2: note = phosphorothioate linkage
  misc_feature 2^3: note = phosphorothioate linkage
  misc_feature 21^22: note = phosphorothioate linkage
  misc_feature 22^23: note = phosphorothioate linkage
tgtcaaaggtggaggcaaacttg

SEQ ID NO: 440 - RNA, 23 nt, synthetic construct
  source 1..23: mol_type = other RNA
  misc_feature 1..23: note = Antisense: ETXS788; corresponding to SEQ ID NO: 200
  modified_base 1: mod_base = um
  modified_base 2: mod_base = OTHER; note = 2' Fluoro-uridine
  modified_base 3: mod_base = gm
  modified_base 4: mod_base = um
  modified_base 5: mod_base = cm
  modified_base 6: mod_base = OTHER; note = 2'Fluoro-adenosine
  modified_base 7: mod_base = OTHER; note = 2'O-methyl-adenosine
  modified_base 8: mod_base = OTHER; note = 2'Fluoro-adenosine
  modified_base 9: mod_base = OTHER; note = 2' Fluoro-guanosine
  modified_base 10: mod_base = gm
  modified_base 11: mod_base = um
  modified_base 12: mod_base = gm
  modified_base 13: mod_base = gm
  modified_base 14: mod_base = OTHER; note = 2'Fluoro-adenosine
  modified_base 15: mod_base = gm
  modified_base 16: mod_base = OTHER; note = 2' Fluoro-guanosine
  modified_base 17: mod_base = cm
  modified_base 18: mod_base = OTHER; note = 2'O-methyl-adenosine
  modified_base 19: mod_base = OTHER; note = 2'O-methyl-adenosine
  modified_base 20: mod_base = OTHER; note = 2'O-methyl-adenosine
  modified_base 21: mod_base = cm
  modified_base 22: mod_base = um
  modified_base 23: mod_base = um
  misc_feature 1^2: note = phosphorothioate linkage
  misc_feature 2^3: note = phosphorothioate linkage
  misc_feature 21^22: note = phosphorothioate linkage
  misc_feature 22^23: note = phosphorothioate linkage
ttgtcaaaggtggaggcaaactt

SEQ ID NO: 441 - RNA, 23 nt, synthetic construct
  source 1..23: mol_type = other RNA
  misc_feature 1..23: note = Antisense: ETXS790; corresponding to SEQ ID NO: 201
  modified_base 1: mod_base = cm
  modified_base 2: mod_base = OTHER; note = 2'Fluoro-adenosine
  modified_base 3: mod_base = um
  modified_base 4: mod_base = um
  modified_base 5: mod_base = um
  modified_base 6: mod_base = OTHER; note = 2' Fluoro-cytidine
  modified_base 7: mod_base = cm
  modified_base 8: mod_base = OTHER; note = 2' Fluoro-cytidine
  modified_base 9: mod_base = OTHER; note = 2' Fluoro-uridine
  modified_base 10: mod_base = um
  modified_base 11: mod_base = um
  modified_base 12: mod_base = gm
  modified_base 13: mod_base = OTHER; note = 2'O-methyl-adenosine
  modified_base 14: mod_base = OTHER; note = 2'Fluoro-adenosine
  modified_base 15: mod_base = cm
  modified_base 16: mod_base = OTHER; note = 2'Fluoro-adenosine
  modified_base 17: mod_base = OTHER; note = 2'O-methyl-adenosine
  modified_base 18: mod_base = gm
  modified_base 19: mod_base = OTHER; note = 2'O-methyl-adenosine
  modified_base 20: mod_base = um
  modified_base 21: mod_base = gm
  modified_base 22: mod_base = um
  modified_base 23: mod_base = OTHER; note = 2'O-methyl-adenosine
  misc_feature 1^2: note = phosphorothioate linkage
  misc_feature 2^3: note = phosphorothioate linkage
  misc_feature 21^22: note = phosphorothioate linkage
  misc_feature 22^23: note = phosphorothioate linkage
catttccctttgaacaagatgta

SEQ ID NO: 442 - RNA, 23 nt, synthetic construct
  source 1..23: mol_type = other RNA
  misc_feature 1..23: note = Antisense: ETXS792; corresponding to SEQ ID NO: 202
  modified_base 1: mod_base = um
  modified_base 2: mod_base = OTHER; note = 2' Fluoro-guanosine
  modified_base 3: mod_base = um
  modified_base 4: mod_base = gm
  modified_base 5: mod_base = gm
  modified_base 6: mod_base = OTHER; note = 2'Fluoro-adenosine
  modified_base 7: mod_base = um
  modified_base 8: mod_base = OTHER; note = 2' Fluoro-guanosine
  modified_base 9: mod_base = OTHER; note = 2'Fluoro-adenosine
  modified_base 10: mod_base = OTHER; note = 2'O-methyl-adenosine
  modified_base 11: mod_base = gm
  modified_base 12: mod_base = gm
  modified_base 13: mod_base = cm
  modified_base 14: mod_base = OTHER; note = 2'Fluoro-adenosine
  modified_base 15: mod_base = OTHER; note = 2'O-methyl-adenosine
  modified_base 16: mod_base = OTHER; note = 2'Fluoro-adenosine
  modified_base 17: mod_base = OTHER; note = 2'O-methyl-adenosine
  modified_base 18: mod_base = cm
  modified_base 19: mod_base = um
  modified_base 20: mod_base = cm
  modified_base 21: mod_base = cm
  modified_base 22: mod_base = cm
  modified_base 23: mod_base = cm
  misc_feature 1^2: note = phosphorothioate linkage
  misc_feature 2^3: note = phosphorothioate linkage
  misc_feature 21^22: note = phosphorothioate linkage
  misc_feature 22^23: note = phosphorothioate linkage
tgtggatgaaggcaaaactcccc

SEQ ID NO: 443 - RNA, 23 nt, synthetic construct
  source 1..23: mol_type = other RNA
  misc_feature 1..23: note = Antisense: ETXS794; corresponding to SEQ ID NO: 203
  modified_base 1: mod_base = cm
  modified_base 2: mod_base = OTHER; note = 2' Fluoro-cytidine
  modified_base 3: mod_base = um
  modified_base 4: mod_base = cm
  modified_base 5: mod_base = OTHER; note = 2'O-methyl-adenosine
  modified_base 6: mod_base = OTHER; note = 2' Fluoro-uridine
  modified_base 7: mod_base = gm
  modified_base 8: mod_base = OTHER; note = 2' Fluoro-guanosine
  modified_base 9: mod_base = OTHER; note = 2'Fluoro-adenosine
  modified_base 10: mod_base = gm
  modified_base 11: mod_base = OTHER; note = 2'O-methyl-adenosine
  modified_base 12: mod_base = um
  modified_base 13: mod_base = cm
  modified_base 14: mod_base = OTHER; note = 2' Fluoro-uridine
  modified_base 15: mod_base = um
  modified_base 16: mod_base = OTHER; note = 2' Fluoro-uridine
  modified_base 17: mod_base = cm
  modified_base 18: mod_base = gm
  modified_base 19: mod_base = cm
  modified_base 20: mod_base = OTHER; note = 2'O-methyl-adenosine
  modified_base 21: mod_base = gm
  modified_base 22: mod_base = cm
  modified_base 23: mod_base = OTHER; note = 2'O-methyl-adenosine
  misc_feature 1^2: note = phosphorothioate linkage
  misc_feature 2^3: note = phosphorothioate linkage
  misc_feature 21^22: note = phosphorothioate linkage
  misc_feature 22^23: note = phosphorothioate linkage
cctcatggagatctttcgcagca

SEQ ID NO: 444 - RNA, 23 nt, synthetic construct
  source 1..23: mol_type = other RNA
  misc_feature 1..23: note = Antisense: ETXS796; corresponding to SEQ ID NO: 204
  modified_base 1: mod_base = cm
  modified_base 2: mod_base = OTHER; note = 2' Fluoro-uridine
  modified_base 3: mod_base = um
  modified_base 4: mod_base = um
  modified_base 5: mod_base = gm
  modified_base 6: mod_base = OTHER; note = 2'Fluoro-adenosine
  modified_base 7: mod_base = um
  modified_base 8: mod_base = OTHER; note = 2' Fluoro-guanosine
  modified_base 9: mod_base = OTHER; note = 2'Fluoro-adenosine
  modified_base 10: mod_base = cm
  modified_base 11: mod_base = OTHER; note = 2'O-methyl-adenosine
  modified_base 12: mod_base = gm
  modified_base 13: mod_base = gm
  modified_base 14: mod_base = OTHER; note = 2'Fluoro-adenosine
  modified_base 15: mod_base = gm
  modified_base 16: mod_base = OTHER; note = 2' Fluoro-guanosine
  modified_base 17: mod_base = cm
  modified_base 18: mod_base = OTHER; note = 2'O-methyl-adenosine
  modified_base 19: mod_base = um
  modified_base 20: mod_base = gm
  modified_base 21: mod_base = gm
  modified_base 22: mod_base = OTHER; note = 2'O-methyl-adenosine
  modified_base 23: mod_base = OTHER; note = 2'O-methyl-adenosine
  misc_feature 1^2: note = phosphorothioate linkage
  misc_feature 2^3: note = phosphorothioate linkage
  misc_feature 21^22: note = phosphorothioate linkage
  misc_feature 22^23: note = phosphorothioate linkage
ctttgatgacaggaggcatggaa

SEQ ID NO: 445 - RNA, 23 nt, synthetic construct
  source 1..23: mol_type = other RNA
  misc_feature 1..23: note = Antisense: ETXS798; corresponding to SEQ ID NO: 205
  modified_base 1: mod_base = um
  modified_base 2: mod_base = OTHER; note = 2' Fluoro-cytidine
  modified_base 3: mod_base = OTHER; note = 2'O-methyl-adenosine
  modified_base 4: mod_base = cm
  modified_base 5: mod_base = cm
  modified_base 6: mod_base = OTHER; note = 2'Fluoro-adenosine
  modified_base 7: mod_base = cm
  modified_base 8: mod_base = OTHER; note = 2' Fluoro-cytidine
  modified_base 9: mod_base = OTHER; note = 2' Fluoro-cytidine
  modified_base 10: mod_base = um
  modified_base 11: mod_base = gm
  modified_base 12: mod_base = cm
  modified_base 13: mod_base = cm
  modified_base 14: mod_base = OTHER; note = 2' Fluoro-cytidine
  modified_base 15: mod_base = OTHER; note = 2'O-methyl-adenosine
  modified_base 16: mod_base = OTHER; note = 2' Fluoro-guanosine
  modified_base 17: mod_base = OTHER; note = 2'O-methyl-adenosine
  modified_base 18: mod_base = OTHER; note = 2'O-methyl-adenosine
  modified_base 19: mod_base = OTHER; note = 2'O-methyl-adenosine
  modified_base 20: mod_base = cm
  modified_base 21: mod_base = OTHER; note = 2'O-methyl-adenosine
  modified_base 22: mod_base = gm
  modified_base 23: mod_base = OTHER; note = 2'O-methyl-adenosine
  misc_feature 1^2: note = phosphorothioate linkage
  misc_feature 2^3: note = phosphorothioate linkage
  misc_feature 21^22: note = phosphorothioate linkage
  misc_feature 22^23: note = phosphorothioate linkage
tcaccaccctgcccagaaacaga

SEQ ID NO: 446 - RNA, 23 nt, synthetic construct
  source 1..23: mol_type = other RNA
  misc_feature 1..23: note = Antisense: ETXS800; corresponding to SEQ ID NO: 206
  modified_base 1: mod_base = um
  modified_base 2: mod_base = OTHER; note = 2' Fluoro-guanosine
  modified_base 3: mod_base = gm
  modified_base 4: mod_base = OTHER; note = 2'O-methyl-adenosine
  modified_base 5: mod_base = gm
  modified_base 6: mod_base = OTHER; note = 2'Fluoro-adenosine
  modified_base 7: mod_base = um
  modified_base 8: mod_base = OTHER; note = 2' Fluoro-cytidine
  modified_base 9: mod_base = OTHER; note = 2' Fluoro-uridine
  modified_base 10: mod_base = um
  modified_base 11: mod_base = um
  modified_base 12: mod_base = cm
  modified_base 13: mod_base = gm
  modified_base 14: mod_base = OTHER; note = 2' Fluoro-cytidine
  modified_base 15: mod_base = OTHER; note = 2'O-methyl-adenosine
  modified_base 16: mod_base = OTHER; note = 2' Fluoro-guanosine
  modified_base 17: mod_base = cm
  modified_base 18: mod_base = OTHER; note = 2'O-methyl-adenosine
  modified_base 19: mod_base = gm
  modified_base 20: mod_base = gm
  modified_base 21: mod_base = cm
  modified_base 22: mod_base = um
  modified_base 23: mod_base = gm
  misc_feature 1^2: note = phosphorothioate linkage
  misc_feature 2^3: note = phosphorothioate linkage
  misc_feature 21^22: note = phosphorothioate linkage
  misc_feature 22^23: note = phosphorothioate linkage
tggagatctttcgcagcaggctg

SEQ ID NO: 447 - RNA, 23 nt, synthetic construct
  source 1..23: mol_type = other RNA
  misc_feature 1..23: note = Antisense: ETXS802; corresponding to SEQ ID NO: 207
  modified_base 1: mod_base = gm
  modified_base 2: mod_base = OTHER; note = 2'Fluoro-adenosine
  modified_base 3: mod_base = um
  modified_base 4: mod_base = um
  modified_base 5: mod_base = OTHER; note = 2'O-methyl-adenosine
  modified_base 6: mod_base = OTHER; note = 2'Fluoro-adenosine
  modified_base 7: mod_base = um
  modified_base 8: mod_base = OTHER; note = 2' Fluoro-cytidine
  modified_base 9: mod_base = OTHER; note = 2' Fluoro-uridine
  modified_base 10: mod_base = cm
  modified_base 11: mod_base = OTHER; note = 2'O-methyl-adenosine
  modified_base 12: mod_base = um
  modified_base 13: mod_base = cm
  modified_base 14: mod_base = OTHER; note = 2'Fluoro-adenosine
  modified_base 15: mod_base = OTHER; note = 2'O-methyl-adenosine
  modified_base 16: mod_base = OTHER; note = 2'Fluoro-adenosine
  modified_base 17: mod_base = cm
  modified_base 18: mod_base = OTHER; note = 2'O-methyl-adenosine
  modified_base 19: mod_base = gm
  modified_base 20: mod_base = um
  modified_base 21: mod_base = um
  modified_base 22: mod_base = um
  modified_base 23: mod_base = gm
  misc_feature 1^2: note = phosphorothioate linkage
  misc_feature 2^3: note = phosphorothioate linkage
  misc_feature 21^22: note = phosphorothioate linkage
  misc_feature 22^23: note = phosphorothioate linkage
gattaatctcatcaaacagtttg

SEQ ID NO: 448 - RNA, 23 nt, synthetic construct
  source 1..23: mol_type = other RNA
  misc_feature 1..23: note = Antisense: ETXS804; corresponding to SEQ ID NO: 208
  modified_base 1: mod_base = cm
  modified_base 2: mod_base = OTHER; note = 2'Fluoro-adenosine
  modified_base 3: mod_base = cm
  modified_base 4: mod_base = um
  modified_base 5: mod_base = um
  modified_base 6: mod_base = OTHER; note = 2' Fluoro-uridine
  modified_base 7: mod_base = gm
  modified_base 8: mod_base = OTHER; note = 2'Fluoro-adenosine
  modified_base 9: mod_base = OTHER; note = 2' Fluoro-uridine
  modified_base 10: mod_base = gm
  modified_base 11: mod_base = OTHER; note = 2'O-methyl-adenosine
  modified_base 12: mod_base = cm
  modified_base 13: mod_base = OTHER; note = 2'O-methyl-adenosine
  modified_base 14: mod_base = OTHER; note = 2' Fluoro-guanosine
  modified_base 15: mod_base = gm
  modified_base 16: mod_base = OTHER; note = 2'Fluoro-adenosine
  modified_base 17: mod_base = gm
  modified_base 18: mod_base = gm
  modified_base 19: mod_base = cm
  modified_base 20: mod_base = OTHER; note = 2'O-methyl-adenosine
  modified_base 21: mod_base = um
  modified_base 22: mod_base = gm
  modified_base 23: mod_base = gm
  misc_feature 1^2: note = phosphorothioate linkage
  misc_feature 2^3: note = phosphorothioate linkage
  misc_feature 21^22: note = phosphorothioate linkage
  misc_feature 22^23: note = phosphorothioate linkage
cactttgatgacaggaggcatgg

SEQ ID NO: 449 - RNA, 23 nt, synthetic construct
  source 1..23: mol_type = other RNA
  misc_feature 1..23: note = Antisense: ETXS806; corresponding to SEQ ID NO: 209
  modified_base 1: mod_base = gm
  modified_base 2: mod_base = OTHER; note = 2' Fluoro-cytidine
  modified_base 3: mod_base = OTHER; note = 2'O-methyl-adenosine
  modified_base 4: mod_base = gm
  modified_base 5: mod_base = cm
  modified_base 6: mod_base = OTHER; note = 2' Fluoro-uridine
  modified_base 7: mod_base = cm
  modified_base 8: mod_base = OTHER; note = 2'Fluoro-adenosine
  modified_base 9: mod_base = OTHER; note = 2' Fluoro-uridine
  modified_base 10: mod_base = gm
  modified_base 11: mod_base = cm
  modified_base 12: mod_base = OTHER; note = 2'O-methyl-adenosine
  modified_base 13: mod_base = um
  modified_base 14: mod_base = OTHER; note = 2' Fluoro-cytidine
  modified_base 15: mod_base = um
  modified_base 16: mod_base = OTHER; note = 2' Fluoro-cytidine
  modified_base 17: mod_base = OTHER; note = 2'O-methyl-adenosine
  modified_base 18: mod_base = um
  modified_base 19: mod_base = OTHER; note = 2'O-methyl-adenosine
  modified_base 20: mod_base = cm
  modified_base 21: mod_base = um
  modified_base 22: mod_base = um
  modified_base 23: mod_base = cm
  misc_feature 1^2: note = phosphorothioate linkage
  misc_feature 2^3: note = phosphorothioate linkage
  misc_feature 21^22: note = phosphorothioate linkage
  misc_feature 22^23: note = phosphorothioate linkage
gcagctcatgcatctcatacttc

SEQ ID NO: 450 - RNA, 23 nt, synthetic construct
  source 1..23: mol_type = other RNA
  misc_feature 1..23: note = Antisense: ETXS808; corresponding to SEQ ID NO: 210
  modified_base 1: mod_base = cm
  modified_base 2: mod_base = OTHER; note = 2'Fluoro-adenosine
  modified_base 3: mod_base = gm
  modified_base 4: mod_base = cm
  modified_base 5: mod_base = um
  modified_base 6: mod_base = OTHER; note = 2' Fluoro-cytidine
  modified_base 7: mod_base = OTHER; note = 2'O-methyl-adenosine
  modified_base 8: mod_base = OTHER; note = 2' Fluoro-uridine
  modified_base 9: mod_base = OTHER; note = 2' Fluoro-guanosine
  modified_base 10: mod_base = cm
  modified_base 11: mod_base = OTHER; note = 2'O-methyl-adenosine
  modified_base 12: mod_base = um
  modified_base 13: mod_base = cm
  modified_base 14: mod_base = OTHER; note = 2' Fluoro-uridine
  modified_base 15: mod_base = cm
  modified_base 16: mod_base = OTHER; note = 2'Fluoro-adenosine
  modified_base 17: mod_base = um
  modified_base 18: mod_base = OTHER; note = 2'O-methyl-adenosine
  modified_base 19: mod_base = cm
  modified_base 20: mod_base = um
  modified_base 21: mod_base = um
  modified_base 22: mod_base = cm
  modified_base 23: mod_base = um
  misc_feature 1^2: note = phosphorothioate linkage
  misc_feature 2^3: note = phosphorothioate linkage
  misc_feature 21^22: note = phosphorothioate linkage
  misc_feature 22^23: note = phosphorothioate linkage
cagctcatgcatctcatacttct

SEQ ID NO: 451 - RNA, 23 nt, synthetic construct
  source 1..23: mol_type = other RNA
  misc_feature 1..23: note = Antisense: ETXS810; corresponding to SEQ ID NO: 211
  modified_base 1: mod_base = um
  modified_base 2: mod_base = OTHER; note = 2' Fluoro-guanosine
  modified_base 3: mod_base = gm
  modified_base 4: mod_base = um
  modified_base 5: mod_base = OTHER; note = 2'O-methyl-adenosine
  modified_base 6: mod_base = OTHER; note = 2' Fluoro-guanosine
  modified_base 7: mod_base = gm
  modified_base 8: mod_base = OTHER; note = 2' Fluoro-guanosine
  modified_base 9: mod_base = OTHER; note = 2' Fluoro-cytidine
  modified_base 10: mod_base = OTHER; note = 2'O-methyl-adenosine
  modified_base 11: mod_base = gm
  modified_base 12: mod_base = um
  modified_base 13: mod_base = um
  modified_base 14: mod_base = OTHER; note = 2' Fluoro-uridine
  modified_base 15: mod_base = gm
  modified_base 16: mod_base = OTHER; note = 2'Fluoro-adenosine
  modified_base 17: mod_base = gm
  modified_base 18: mod_base = gm
  modified_base 19: mod_base = OTHER; note = 2'O-methyl-adenosine
  modified_base 20: mod_base = cm
  modified_base 21: mod_base = OTHER; note = 2'O-methyl-adenosine
  modified_base 22: mod_base = um
  modified_base 23: mod_base = gm
  misc_feature 1^2: note = phosphorothioate linkage
  misc_feature 2^3: note = phosphorothioate linkage
  misc_feature 21^22: note = phosphorothioate linkage
  misc_feature 22^23: note = phosphorothioate linkage
tggtagggcagtttgaggacatg

SEQ ID NO: 452 - RNA, 23 nt, synthetic construct
  source 1..23: mol_type = other RNA
  misc_feature 1..23: note = Antisense: ETXS812; corresponding to SEQ ID NO: 212
  modified_base 1: mod_base = gm
  modified_base 2: mod_base = OTHER; note = 2' Fluoro-guanosine
  modified_base 3: mod_base = OTHER; note = 2'O-methyl-adenosine
  modified_base 4: mod_base = um
  modified_base 5: mod_base = um
  modified_base 6: mod_base = OTHER; note = 2'Fluoro-adenosine
  modified_base 7: mod_base = OTHER; note = 2'O-methyl-adenosine
  modified_base 8: mod_base = OTHER; note = 2' Fluoro-uridine
  modified_base 9: mod_base = OTHER; note = 2' Fluoro-cytidine
  modified_base 10: mod_base = um
  modified_base 11: mod_base = cm
  modified_base 12: mod_base = OTHER; note = 2'O-methyl-adenosine
  modified_base 13: mod_base = um
  modified_base 14: mod_base = OTHER; note = 2' Fluoro-cytidine
  modified_base 15: mod_base = OTHER; note = 2'O-methyl-adenosine
  modified_base 16: mod_base = OTHER; note = 2'Fluoro-adenosine
  modified_base 17: mod_base = OTHER; note = 2'O-methyl-adenosine
  modified_base 18: mod_base = cm
  modified_base 19: mod_base = OTHER; note = 2'O-methyl-adenosine
  modified_base 20: mod_base = gm
  modified_base 21: mod_base = um
  modified_base 22: mod_base = um
  modified_base 23: mod_base = um
  misc_feature 1^2: note = phosphorothioate linkage
  misc_feature 2^3: note = phosphorothioate linkage
  misc_feature 21^22: note = phosphorothioate linkage
  misc_feature 22^23: note = phosphorothioate linkage
ggattaatctcatcaaacagttt

SEQ ID NO: 453 - RNA, 23 nt, synthetic construct
  source 1..23: mol_type = other RNA
  misc_feature 1..23: note = Antisense: ETXS814; corresponding to SEQ ID NO: 213
  modified_base 1: mod_base = OTHER; note = 2'O-methyl-adenosine
  modified_base 2: mod_base = OTHER; note = 2' Fluoro-uridine
  modified_base 3: mod_base = cm
  modified_base 4: mod_base = OTHER; note = 2'O-methyl-adenosine
  modified_base 5: mod_base = um
  modified_base 6: mod_base = OTHER; note = 2' Fluoro-guanosine
  modified_base 7: mod_base = gm
  modified_base 8: mod_base = OTHER; note = 2' Fluoro-guanosine
  modified_base 9: mod_base = OTHER; note = 2' Fluoro-cytidine
  modified_base 10: mod_base = OTHER; note = 2'O-methyl-adenosine
  modified_base 11: mod_base = cm
  modified_base 12: mod_base = cm
  modified_base 13: mod_base = um
  modified_base 14: mod_base = OTHER; note = 2' Fluoro-uridine
  modified_base 15: mod_base = OTHER; note = 2'O-methyl-adenosine
  modified_base 16: mod_base = OTHER; note = 2'Fluoro-adenosine
  modified_base 17: mod_base = um
  modified_base 18: mod_base = gm
  modified_base 19: mod_base = gm
  modified_base 20: mod_base = um
  modified_base 21: mod_base = cm
  modified_base 22: mod_base = um
  modified_base 23: mod_base = um
  misc_feature 1^2: note = phosphorothioate linkage
  misc_feature 2^3: note = phosphorothioate linkage
  misc_feature 21^22: note = phosphorothioate linkage
  misc_feature 22^23: note = phosphorothioate linkage
atcatgggcaccttaatggtctt

SEQ ID NO: 454 - RNA, 23 nt, synthetic construct
  source 1..23: mol_type = other RNA
  misc_feature 1..23: note = Antisense: ETXS816; corresponding to SEQ ID NO: 214
  modified_base 1: mod_base = cm
  modified_base 2: mod_base = OTHER; note = 2'Fluoro-adenosine
  modified_base 3: mod_base = um
  modified_base 4: mod_base = cm
  modified_base 5: mod_base = OTHER; note = 2'O-methyl-adenosine
  modified_base 6: mod_base = OTHER; note = 2' Fluoro-uridine
  modified_base 7: mod_base = gm
  modified_base 8: mod_base = OTHER; note = 2' Fluoro-guanosine
  modified_base 9: mod_base = OTHER; note = 2' Fluoro-guanosine
  modified_base 10: mod_base = cm
  modified_base 11: mod_base = OTHER; note = 2'O-methyl-adenosine
  modified_base 12: mod_base = cm
  modified_base 13: mod_base = cm
  modified_base 14: mod_base = OTHER; note = 2' Fluoro-uridine
  modified_base 15: mod_base = um
  modified_base 16: mod_base = OTHER; note = 2'Fluoro-adenosine
  modified_base 17: mod_base = OTHER; note = 2'O-methyl-adenosine
  modified_base 18: mod_base = um
  modified_base 19: mod_base = gm
  modified_base 20: mod_base = gm
  modified_base 21: mod_base = um
  modified_base 22: mod_base = cm
  modified_base 23: mod_base = um
  misc_feature 1^2: note = phosphorothioate linkage
  misc_feature 2^3: note = phosphorothioate linkage
  misc_feature 21^22: note = phosphorothioate linkage
  misc_feature 22^23: note = phosphorothioate linkage
catcatgggcaccttaatggtct

SEQ ID NO: 455 - RNA, 23 nt, synthetic construct
  source 1..23: mol_type = other RNA
  misc_feature 1..23: note = Antisense: ETXS818; corresponding to SEQ ID NO: 215
  modified_base 1: mod_base = um
  modified_base 2: mod_base = OTHER; note = 2' Fluoro-uridine
  modified_base 3: mod_base = cm
  modified_base 4: mod_base = OTHER; note = 2'O-methyl-adenosine
  modified_base 5: mod_base = cm
  modified_base 6: mod_base = OTHER; note = 2' Fluoro-cytidine
  modified_base 7: mod_base = OTHER; note = 2'O-methyl-adenosine
  modified_base 8: mod_base = OTHER; note = 2' Fluoro-cytidine
  modified_base 9: mod_base = OTHER; note = 2' Fluoro-cytidine
  modified_base 10: mod_base = cm
  modified_base 11: mod_base = um
  modified_base 12: mod_base = gm
  modified_base 13: mod_base = cm
  modified_base 14: mod_base = OTHER; note = 2' Fluoro-cytidine
  modified_base 15: mod_base = cm
  modified_base 16: mod_base = OTHER; note = 2'Fluoro-adenosine
  modified_base 17: mod_base = gm
  modified_base 18: mod_base = OTHER; note = 2'O-methyl-adenosine
  modified_base 19: mod_base = OTHER; note = 2'O-methyl-adenosine
  modified_base 20: mod_base = OTHER; note = 2'O-methyl-adenosine
  modified_base 21: mod_base = cm
  modified_base 22: mod_base = OTHER; note = 2'O-methyl-adenosine
  modified_base 23: mod_base = gm
  misc_feature 1^2: note = phosphorothioate linkage
  misc_feature 2^3: note = phosphorothioate linkage
  misc_feature 21^22: note = phosphorothioate linkage
  misc_feature 22^23: note = phosphorothioate linkage
ttcaccaccctgcccagaaacag

SEQ ID NO: 456 - RNA, 23 nt, synthetic construct
  source 1..23: mol_type = other RNA
  misc_feature 1..23: note = Antisense: ETXS820; corresponding to SEQ ID NO: 216
  modified_base 1: mod_base = cm
  modified_base 2: mod_base = OTHER; note = 2' Fluoro-cytidine
  modified_base 3: mod_base = OTHER; note = 2'O-methyl-adenosine
  modified_base 4: mod_base = cm
  modified_base 5: mod_base = cm
  modified_base 6: mod_base = OTHER; note = 2' Fluoro-cytidine
  modified_base 7: mod_base = um
  modified_base 8: mod_base = OTHER; note = 2' Fluoro-guanosine
  modified_base 9: mod_base = OTHER; note = 2' Fluoro-cytidine
  modified_base 10: mod_base = cm
  modified_base 11: mod_base = cm
  modified_base 12: mod_base = OTHER; note = 2'O-methyl-adenosine
  modified_base 13: mod_base = gm
  modified_base 14: mod_base = OTHER; note = 2'Fluoro-adenosine
  modified_base 15: mod_base = OTHER; note = 2'O-methyl-adenosine
  modified_base 16: mod_base = OTHER; note = 2'Fluoro-adenosine
  modified_base 17: mod_base = cm
  modified_base 18: mod_base = OTHER; note = 2'O-methyl-adenosine
  modified_base 19: mod_base = gm
  modified_base 20: mod_base = OTHER; note = 2'O-methyl-adenosine
  modified_base 21: mod_base = OTHER; note = 2'O-methyl-adenosine
  modified_base 22: mod_base = gm
  modified_base 23: mod_base = cm
  misc_feature 1^2: note = phosphorothioate linkage
  misc_feature 2^3: note = phosphorothioate linkage
  misc_feature 21^22: note = phosphorothioate linkage
  misc_feature 22^23: note = phosphorothioate linkage
ccaccctgcccagaaacagaagc

SEQ ID NO: 457 - RNA, 23 nt, synthetic construct
  source 1..23: mol_type = other RNA
  misc_feature 1..23: note = Antisense: ETXS822; corresponding to SEQ ID NO: 217
  modified_base 1: mod_base = gm
  modified_base 2: mod_base = OTHER; note = 2' Fluoro-cytidine
  modified_base 3: mod_base = um
  modified_base 4: mod_base = um
  modified_base 5: mod_base = gm
  modified_base 6: mod_base = OTHER; note = 2'Fluoro-adenosine
  modified_base 7: mod_base = OTHER; note = 2'O-methyl-adenosine
  modified_base 8: mod_base = OTHER; note = 2' Fluoro-cytidine
  modified_base 9: mod_base = OTHER; note = 2' Fluoro-uridine
  modified_base 10: mod_base = um
  modified_base 11: mod_base = cm
  modified_base 12: mod_base = gm
  modified_base 13: mod_base = gm
  modified_base 14: mod_base = OTHER; note = 2'Fluoro-adenosine
  modified_base 15: mod_base = OTHER; note = 2'O-methyl-adenosine
  modified_base 16: mod_base = OTHER; note = 2'Fluoro-adenosine
  modified_base 17: mod_base = gm
  modified_base 18: mod_base = OTHER; note = 2'O-methyl-adenosine
  modified_base 19: mod_base = OTHER; note = 2'O-methyl-adenosine
  modified_base 20: mod_base = OTHER; note = 2'O-methyl-adenosine
  modified_base 21: mod_base = OTHER; note = 2'O-methyl-adenosine
  modified_base 22: mod_base = cm
  modified_base 23: mod_base = um
  misc_feature 1^2: note = phosphorothioate linkage
  misc_feature 2^3: note = phosphorothioate linkage
  misc_feature 21^22: note = phosphorothioate linkage
  misc_feature 22^23: note = phosphorothioate linkage
gcttgaacttcggaaagaaaact

SEQ ID NO: 458 - RNA, 23 nt, synthetic construct
  source 1..23: mol_type = other RNA
  misc_feature 1..23: note = Antisense: ETXS824; corresponding to SEQ ID NO: 218
  modified_base 1: mod_base = OTHER; note = 2'O-methyl-adenosine
  modified_base 2: mod_base = OTHER; note = 2' Fluoro-guanosine
  modified_base 3: mod_base = cm
  modified_base 4: mod_base = um
  modified_base 5: mod_base = um
  modified_base 6: mod_base = OTHER; note = 2' Fluoro-guanosine
  modified_base 7: mod_base = OTHER; note = 2'O-methyl-adenosine
  modified_base 8: mod_base = OTHER; note = 2'Fluoro-adenosine
  modified_base 9: mod_base = OTHER; note = 2' Fluoro-cytidine
  modified_base 10: mod_base = um
  modified_base 11: mod_base = um
  modified_base 12: mod_base = cm
  modified_base 13: mod_base = gm
  modified_base 14: mod_base = OTHER; note = 2' Fluoro-guanosine
  modified_base 15: mod_base = OTHER; note = 2'O-methyl-adenosine
  modified_base 16: mod_base = OTHER; note = 2'Fluoro-adenosine
  modified_base 17: mod_base = OTHER; note = 2'O-methyl-adenosine
  modified_base 18: mod_base = gm
  modified_base 19: mod_base = OTHER; note = 2'O-methyl-adenosine
  modified_base 20: mod_base = OTHER; note = 2'O-methyl-adenosine
  modified_base 21: mod_base = OTHER; note = 2'O-methyl-adenosine
  modified_base 22: mod_base = OTHER; note = 2'O-methyl-adenosine
  modified_base 23: mod_base = cm
  misc_feature 1^2: note = phosphorothioate linkage
  misc_feature 2^3: note = phosphorothioate linkage
  misc_feature 21^22: note = phosphorothioate linkage
  misc_feature 22^23: note = phosphorothioate linkage
agcttgaacttcggaaagaaaac

SEQ ID NO: 459 - RNA, 23 nt, synthetic construct
  source 1..23: mol_type = other RNA
  misc_feature 1..23: note = Antisense: ETXS826; corresponding to SEQ ID NO: 219
  modified_base 1: mod_base = OTHER; note = 2'O-methyl-adenosine
  modified_base 2: mod_base = OTHER; note = 2' Fluoro-cytidine
  modified_base 3: mod_base = cm
  modified_base 4: mod_base = OTHER; note = 2'O-methyl-adenosine
  modified_base 5: mod_base = cm
  modified_base 6: mod_base = OTHER; note = 2' Fluoro-cytidine
  modified_base 7: mod_base = cm
  modified_base 8: mod_base = OTHER; note = 2' Fluoro-uridine
  modified_base 9: mod_base = OTHER; note = 2' Fluoro-guanosine
  modified_base 10: mod_base = cm
  modified_base 11: mod_base = cm
  modified_base 12: mod_base = cm
  modified_base 13: mod_base = OTHER; note = 2'O-methyl-adenosine
  modified_base 14: mod_base = OTHER; note = 2' Fluoro-guanosine
  modified_base 15: mod_base = OTHER; note = 2'O-methyl-adenosine
  modified_base 16: mod_base = OTHER; note = 2'Fluoro-adenosine
  modified_base 17: mod_base = OTHER; note = 2'O-methyl-adenosine
  modified_base 18: mod_base = cm
  modified_base 19: mod_base = OTHER; note = 2'O-methyl-adenosine
  modified_base 20: mod_base = gm
  modified_base 21: mod_base = OTHER; note = 2'O-methyl-adenosine
  modified_base 22: mod_base = OTHER; note = 2'O-methyl-adenosine
  modified_base 23: mod_base = gm
  misc_feature 1^2: note = phosphorothioate linkage
  misc_feature 2^3: note = phosphorothioate linkage
  misc_feature 21^22: note = phosphorothioate linkage
  misc_feature 22^23: note = phosphorothioate linkage
accaccctgcccagaaacagaag

SEQ ID NO: 460 - RNA, 23 nt, synthetic construct
  source 1..23: mol_type = other RNA
  misc_feature 1..23: note = Antisense: ETXS828; corresponding to SEQ ID NO: 220
  modified_base 1: mod_base = gm
  modified_base 2: mod_base = OTHER; note = 2' Fluoro-guanosine
  modified_base 3: mod_base = um
  modified_base 4: mod_base = OTHER; note = 2'O-methyl-adenosine
  modified_base 5: mod_base = gm
  modified_base 6: mod_base = OTHER; note = 2' Fluoro-guanosine
  modified_base 7: mod_base = gm
  modified_base 8: mod_base = OTHER; note = 2' Fluoro-cytidine
  modified_base 9: mod_base = OTHER; note = 2'Fluoro-adenosine
  modified_base 10: mod_base = gm
  modified_base 11: mod_base = um
  modified_base 12: mod_base = um
  modified_base 13: mod_base = um
  modified_base 14: mod_base = OTHER; note = 2' Fluoro-guanosine
  modified_base 15: mod_base = OTHER; note = 2'O-methyl-adenosine
  modified_base 16: mod_base = OTHER; note = 2' Fluoro-guanosine
  modified_base 17: mod_base = gm
  modified_base 18: mod_base = OTHER; note = 2'O-methyl-adenosine
  modified_base 19: mod_base = cm
  modified_base 20: mod_base = OTHER; note = 2'O-methyl-adenosine
  modified_base 21: mod_base = um
  modified_base 22: mod_base = gm
  modified_base 23: mod_base = OTHER; note = 2'O-methyl-adenosine
  misc_feature 1^2: note = phosphorothioate linkage
  misc_feature 2^3: note = phosphorothioate linkage
  misc_feature 21^22: note = phosphorothioate linkage
  misc_feature 22^23: note = phosphorothioate linkage
ggtagggcagtttgaggacatga

SEQ ID NO: 461 - RNA, 23 nt, synthetic construct
  source 1..23: mol_type = other RNA
  misc_feature 1..23: note = Antisense: ETXS830; corresponding to SEQ ID NO: 221
  modified_base 1: mod_base = um
  modified_base 2: mod_base = OTHER; note = 2' Fluoro-guanosine
  modified_base 3: mod_base = um
  modified_base 4: mod_base = cm
  modified_base 5: mod_base = cm
  modified_base 6: mod_base = OTHER; note = 2'Fluoro-adenosine
  modified_base 7: mod_base = gm
  modified_base 8: mod_base = OTHER; note = 2' Fluoro-guanosine
  modified_base 9: mod_base = OTHER; note = 2' Fluoro-uridine
  modified_base 10: mod_base = gm
  modified_base 11: mod_base = gm
  modified_base 12: mod_base = OTHER; note = 2'O-methyl-adenosine
  modified_base 13: mod_base = OTHER; note = 2'O-methyl-adenosine
  modified_base 14: mod_base = OTHER; note = 2'Fluoro-adenosine
  modified_base 15: mod_base = gm
  modified_base 16: mod_base = OTHER; note = 2' Fluoro-uridine
  modified_base 17: mod_base = gm
  modified_base 18: mod_base = um
  modified_base 19: mod_base = cm
  modified_base 20: mod_base = gm
  modified_base 21: mod_base = OTHER; note = 2'O-methyl-adenosine
  modified_base 22: mod_base = cm
  modified_base 23: mod_base = um
  misc_feature 1^2: note = phosphorothioate linkage
  misc_feature 2^3: note = phosphorothioate linkage
  misc_feature 21^22: note = phosphorothioate linkage
  misc_feature 22^23: note = phosphorothioate linkage
tgtccaggtggaaagtgtcgact

SEQ ID NO: 462 - RNA, 19 nt, synthetic construct
  source 1..19: mol_type = other RNA
  misc_feature 1..19: note = Antisense: ETXS832; corresponding to SEQ ID NO: 222
  modified_base 1: mod_base = OTHER; note = 2'O-methyl-adenosine
  modified_base 2: mod_base = OTHER; note = 2'Fluoro-adenosine
  modified_base 3: mod_base = OTHER; note = 2'O-methyl-adenosine
  modified_base 4: mod_base = OTHER; note = 2' Fluoro-uridine
  modified_base 5: mod_base = cm
  modified_base 6: mod_base = OTHER; note = 2' Fluoro-cytidine
  modified_base 7: mod_base = um
  modified_base 8: mod_base = OTHER; note = 2' Fluoro-uridine
  modified_base 9: mod_base = gm
  modified_base 10: mod_base = OTHER; note = 2' Fluoro-uridine
  modified_base 11: mod_base = gm
  modified_base 12: mod_base = OTHER; note = 2' Fluoro-guanosine
  modified_base 13: mod_base = OTHER; note = 2'O-methyl-adenosine
  modified_base 14: mod_base = OTHER; note = 2' Fluoro-uridine
  modified_base 15: mod_base = gm
  modified_base 16: mod_base = OTHER; note = 2'Fluoro-adenosine
  modified_base 17: mod_base = OTHER; note = 2'O-methyl-adenosine
  modified_base 18: mod_base = OTHER; note = 2' Fluoro-guanosine
  modified_base 19: mod_base = gm
  misc_feature 1^2: note = phosphorothioate linkage
  misc_feature 2^3: note = phosphorothioate linkage
  misc_feature 17^18: note = phosphorothioate linkage
  misc_feature 18^19: note = phosphorothioate linkage
aaatccttgtggatgaagg

SEQ ID NO: 463 - RNA, 19 nt, synthetic construct
  source 1..19: mol_type = other RNA
  misc_feature 1..19: note = Antisense: ETXS834; corresponding to SEQ ID NO: 223
  modified_base 1: mod_base = gm
  modified_base 2: mod_base = OTHER; note = 2' Fluoro-cytidine
  modified_base 3: mod_base = cm
  modified_base 4: mod_base = OTHER; note = 2' Fluoro-uridine
  modified_base 5: mod_base = cm
  modified_base 6: mod_base = OTHER; note = 2'Fluoro-adenosine
  modified_base 7: mod_base = um
  modified_base 8: mod_base = OTHER; note = 2' Fluoro-guanosine
  modified_base 9: mod_base = gm
  modified_base 10: mod_base = OTHER; note = 2'Fluoro-adenosine
  modified_base 11: mod_base = gm
  modified_base 12: mod_base = OTHER; note = 2'Fluoro-adenosine
  modified_base 13: mod_base = um
  modified_base 14: mod_base = OTHER; note = 2' Fluoro-cytidine
  modified_base 15: mod_base = um
  modified_base 16: mod_base = OTHER; note = 2' Fluoro-uridine
  modified_base 17: mod_base = um
  modified_base 18: mod_base = OTHER; note = 2' Fluoro-cytidine
  modified_base 19: mod_base = gm
  misc_feature 1^2: note = phosphorothioate linkage
  misc_feature 2^3: note = phosphorothioate linkage
  misc_feature 17^18: note = phosphorothioate linkage
  misc_feature 18^19: note = phosphorothioate linkage
gcctcatggagatctttcg

SEQ ID NO: 464 - RNA, 19 nt, synthetic construct
  source 1..19: mol_type = other RNA
  misc_feature 1..19: note = Antisense: ETXS836; corresponding to SEQ ID NO: 224
  modified_base 1: mod_base = um
  modified_base 2: mod_base = OTHER; note = 2' Fluoro-uridine
  modified_base 3: mod_base = cm
  modified_base 4: mod_base = OTHER; note = 2' Fluoro-uridine
  modified_base 5: mod_base = cm
  modified_base 6: mod_base = OTHER; note = 2' Fluoro-cytidine
  modified_base 7: mod_base = OTHER; note = 2'O-methyl-adenosine
  modified_base 8: mod_base = OTHER; note = 2' Fluoro-uridine
  modified_base 9: mod_base = gm
  modified_base 10: mod_base = OTHER; note = 2'Fluoro-adenosine
  modified_base 11: mod_base = gm
  modified_base 12: mod_base = OTHER; note = 2' Fluoro-guanosine
  modified_base 13: mod_base = OTHER; note = 2'O-methyl-adenosine
  modified_base 14: mod_base = OTHER; note = 2' Fluoro-cytidine
  modified_base 15: mod_base = cm
  modified_base 16: mod_base = OTHER; note = 2'Fluoro-adenosine
  modified_base 17: mod_base = cm
  modified_base 18: mod_base = OTHER; note = 2' Fluoro-cytidine
  modified_base 19: mod_base = OTHER; note = 2'O-methyl-adenosine
  misc_feature 1^2: note = phosphorothioate linkage
  misc_feature 2^3: note = phosphorothioate linkage
  misc_feature 17^18: note = phosphorothioate linkage
  misc_feature 18^19: note = phosphorothioate linkage
ttctccatgaggaccacca

SEQ ID NO: 465 - RNA, 19 nt, synthetic construct
  source 1..19: mol_type = other RNA
  misc_feature 1..19: note = Antisense: ETXS838; corresponding to SEQ ID NO: 225
  modified_base 1: mod_base = um
  modified_base 2: mod_base = OTHER; note = 2' Fluoro-guanosine
  modified_base 3: mod_base = cm
  modified_base 4: mod_base = OTHER; note = 2' Fluoro-cytidine
  modified_base 5: mod_base = um
  modified_base 6: mod_base = OTHER; note = 2' Fluoro-cytidine
  modified_base 7: mod_base = OTHER; note = 2'O-methyl-adenosine
  modified_base 8: mod_base = OTHER; note = 2' Fluoro-uridine
  modified_base 9: mod_base = gm
  modified_base 10: mod_base = OTHER; note = 2' Fluoro-guanosine
  modified_base 11: mod_base = OTHER; note = 2'O-methyl-adenosine
  modified_base 12: mod_base = OTHER; note = 2' Fluoro-guanosine
  modified_base 13: mod_base = OTHER; note = 2'O-methyl-adenosine
  modified_base 14: mod_base = OTHER; note = 2' Fluoro-uridine
  modified_base 15: mod_base = cm
  modified_base 16: mod_base = OTHER; note = 2' Fluoro-uridine
  modified_base 17: mod_base = um
  modified_base 18: mod_base = OTHER; note = 2' Fluoro-uridine
  modified_base 19: mod_base = cm
  misc_feature 1^2: note = phosphorothioate linkage
  misc_feature 2^3: note = phosphorothioate linkage
  misc_feature 17^18: note = phosphorothioate linkage
  misc_feature 18^19: note = phosphorothioate linkage
tgcctcatggagatctttc

SEQ ID NO: 466 - RNA, 19 nt, synthetic construct
  source 1..19: mol_type = other RNA
  misc_feature 1..19: note = Antisense: ETXS840; corresponding to SEQ ID NO: 226
  modified_base 1: mod_base = OTHER; note = 2'O-methyl-adenosine
  modified_base 2: mod_base = OTHER; note = 2' Fluoro-guanosine
  modified_base 3: mod_base = cm
  modified_base 4: mod_base = OTHER; note = 2'Fluoro-adenosine
  modified_base 5: mod_base = gm
  modified_base 6: mod_base = OTHER; note = 2' Fluoro-cytidine
  modified_base 7: mod_base = um
  modified_base 8: mod_base = OTHER; note = 2' Fluoro-cytidine
  modified_base 9: mod_base = OTHER; note = 2'O-methyl-adenosine
  modified_base 10: mod_base = OTHER; note = 2' Fluoro-uridine
  modified_base 11: mod_base = gm
  modified_base 12: mod_base = OTHER; note = 2' Fluoro-cytidine
  modified_base 13: mod_base = OTHER; note = 2'O-methyl-adenosine
  modified_base 14: mod_base = OTHER; note = 2' Fluoro-uridine
  modified_base 15: mod_base = cm
  modified_base 16: mod_base = OTHER; note = 2' Fluoro-uridine
  modified_base 17: mod_base = cm
  modified_base 18: mod_base = OTHER; note = 2'Fluoro-adenosine
  modified_base 19: mod_base = um
  misc_feature 1^2: note = phosphorothioate linkage
  misc_feature 2^3: note = phosphorothioate linkage
  misc_feature 17^18: note = phosphorothioate linkage
  misc_feature 18^19: note = phosphorothioate linkage
agcagctcatgcatctcat

SEQ ID NO: 467 - RNA, 19 nt, synthetic construct
  source 1..19: mol_type = other RNA
  misc_feature 1..19: note = Antisense: ETXS842; corresponding to SEQ ID NO: 227
  modified_base 1: mod_base = um
  modified_base 2: mod_base = OTHER; note = 2' Fluoro-cytidine
  modified_base 3: mod_base = OTHER; note = 2'O-methyl-adenosine
  modified_base 4: mod_base = OTHER; note = 2' Fluoro-guanosine
  modified_base 5: mod_base = gm
  modified_base 6: mod_base = OTHER; note = 2'Fluoro-adenosine
  modified_base 7: mod_base = um
  modified_base 8: mod_base = OTHER; note = 2' Fluoro-uridine
  modified_base 9: mod_base = OTHER; note = 2'O-methyl-adenosine
  modified_base 10: mod_base = OTHER; note = 2'Fluoro-adenosine
  modified_base 11: mod_base = um
  modified_base 12: mod_base = OTHER; note = 2' Fluoro-cytidine
  modified_base 13: mod_base = um
  modified_base 14: mod_base = OTHER; note = 2' Fluoro-cytidine
  modified_base 15: mod_base = OTHER; note = 2'O-methyl-adenosine
  modified_base 16: mod_base = OTHER; note = 2' Fluoro-uridine
  modified_base 17: mod_base = cm
  modified_base 18: mod_base = OTHER; note = 2'Fluoro-adenosine
  modified_base 19: mod_base = OTHER; note = 2'O-methyl-adenosine
  misc_feature 1^2: note = phosphorothioate linkage
  misc_feature 2^3: note = phosphorothioate linkage
  misc_feature 17^18: note = phosphorothioate linkage
  misc_feature 18^19: note = phosphorothioate linkage
tcaggattaatctcatcaa

SEQ ID NO: 468 - RNA, 19 nt, synthetic construct
  source 1..19: mol_type = other RNA
  misc_feature 1..19: note = Antisense: ETXS844; corresponding to SEQ ID NO: 228
  modified_base 1: mod_base = um
  modified_base 2: mod_base = OTHER; note = 2' Fluoro-uridine
  modified_base 3: mod_base = gm
  modified_base 4: mod_base = OTHER; note = 2' Fluoro-guanosine
  modified_base 5: mod_base = um
  modified_base 6: mod_base = OTHER; note = 2' Fluoro-uridine
  modified_base 7: mod_base = um
  modified_base 8: mod_base = OTHER; note = 2' Fluoro-cytidine
  modified_base 9: mod_base = OTHER; note = 2'O-methyl-adenosine
  modified_base 10: mod_base = OTHER; note = 2' Fluoro-guanosine
  modified_base 11: mod_base = gm
  modified_base 12: mod_base = OTHER; note = 2'Fluoro-adenosine
  modified_base 13: mod_base = um
  modified_base 14: mod_base = OTHER; note = 2' Fluoro-uridine
  modified_base 15: mod_base = OTHER; note = 2'O-methyl-adenosine
  modified_base 16: mod_base = OTHER; note = 2'Fluoro-adenosine
  modified_base 17: mod_base = um
  modified_base 18: mod_base = OTHER; note = 2' Fluoro-cytidine
  modified_base 19: mod_base = um
  misc_feature 1^2: note = phosphorothioate linkage
  misc_feature 2^3: note = phosphorothioate linkage
  misc_feature 17^18: note = phosphorothioate linkage
  misc_feature 18^19: note = phosphorothioate linkage
ttggtttcaggattaatct

SEQ ID NO: 469 - RNA, 19 nt, synthetic construct
  source 1..19: mol_type = other RNA
  misc_feature 1..19: note = Antisense: ETXS846; corresponding to SEQ ID NO: 229
  modified_base 1: mod_base = gm
  modified_base 2: mod_base = OTHER; note = 2' Fluoro-uridine
  modified_base 3: mod_base = um
  modified_base 4: mod_base = OTHER; note = 2' Fluoro-uridine
  modified_base 5: mod_base = cm
  modified_base 6: mod_base = OTHER; note = 2'Fluoro-adenosine
  modified_base 7: mod_base = gm
  modified_base 8: mod_base = OTHER; note = 2' Fluoro-guanosine
  modified_base 9: mod_base = OTHER; note = 2'O-methyl-adenosine
  modified_base 10: mod_base = OTHER; note = 2' Fluoro-uridine
  modified_base 11: mod_base = um
  modified_base 12: mod_base = OTHER; note = 2'Fluoro-adenosine
  modified_base 13: mod_base = OTHER; note = 2'O-methyl-adenosine
  modified_base 14: mod_base = OTHER; note = 2' Fluoro-uridine
  modified_base 15: mod_base = cm
  modified_base 16: mod_base = OTHER; note = 2' Fluoro-uridine
  modified_base 17: mod_base = cm
  modified_base 18: mod_base = OTHER; note = 2'Fluoro-adenosine
  modified_base 19: mod_base = um
  misc_feature 1^2: note = phosphorothioate linkage
  misc_feature 2^3: note = phosphorothioate linkage
  misc_feature 17^18: note = phosphorothioate linkage
  misc_feature 18^19: note = phosphorothioate linkage
gtttcaggattaatctcat

SEQ ID NO: 470 - RNA, 19 nt, synthetic construct
  source 1..19: mol_type = other RNA
  misc_feature 1..19: note = Antisense: ETXS848; corresponding to SEQ ID NO: 230
  modified_base 1: mod_base = um
  modified_base 2: mod_base = OTHER; note = 2' Fluoro-guanosine
  modified_base 3: mod_base = gm
  modified_base 4: mod_base = OTHER; note = 2' Fluoro-uridine
  modified_base 5: mod_base = um
  modified_base 6: mod_base = OTHER; note = 2' Fluoro-uridine
  modified_base 7: mod_base = cm
  modified_base 8: mod_base = OTHER; note = 2'Fluoro-adenosine
  modified_base 9: mod_base = gm
  modified_base 10: mod_base = OTHER; note = 2' Fluoro-guanosine
  modified_base 11: mod_base = OTHER; note = 2'O-methyl-adenosine
  modified_base 12: mod_base = OTHER; note = 2' Fluoro-uridine
  modified_base 13: mod_base = um
  modified_base 14: mod_base = OTHER; note = 2'Fluoro-adenosine
  modified_base 15: mod_base = OTHER; note = 2'O-methyl-adenosine
  modified_base 16: mod_base = OTHER; note = 2' Fluoro-uridine
  modified_base 17: mod_base = cm
  modified_base 18: mod_base = OTHER; note = 2' Fluoro-uridine
  modified_base 19: mod_base = cm
  misc_feature 1^2: note = phosphorothioate linkage
  misc_feature 2^3: note = phosphorothioate linkage
  misc_feature 17^18: note = phosphorothioate linkage
  misc_feature 18^19: note = phosphorothioate linkage
tggtttcaggattaatctc

SEQ ID NO: 471 - RNA, 19 nt, synthetic construct
  source 1..19: mol_type = other RNA
  misc_feature 1..19: note = Antisense: ETXS850; corresponding to SEQ ID NO: 231
  modified_base 1: mod_base = gm
  modified_base 2: mod_base = OTHER; note = 2' Fluoro-guanosine
  modified_base 3: mod_base = um
  modified_base 4: mod_base = OTHER; note = 2' Fluoro-uridine
  modified_base 5: mod_base = um
  modified_base 6: mod_base = OTHER; note = 2' Fluoro-cytidine
  modified_base 7: mod_base = OTHER; note = 2'O-methyl-adenosine
  modified_base 8: mod_base = OTHER; note = 2' Fluoro-guanosine
  modified_base 9: mod_base = gm
  modified_base 10: mod_base = OTHER; note = 2'Fluoro-adenosine
  modified_base 11: mod_base = um
  modified_base 12: mod_base = OTHER; note = 2' Fluoro-uridine
  modified_base 13: mod_base = OTHER; note = 2'O-methyl-adenosine
  modified_base 14: mod_base = OTHER; note = 2'Fluoro-adenosine
  modified_base 15: mod_base = um
  modified_base 16: mod_base = OTHER; note = 2' Fluoro-cytidine
  modified_base 17: mod_base = um
  modified_base 18: mod_base = OTHER; note = 2' Fluoro-cytidine
  modified_base 19: mod_base = OTHER; note = 2'O-methyl-adenosine
  misc_feature 1^2: note = phosphorothioate linkage
  misc_feature 2^3: note = phosphorothioate linkage
  misc_feature 17^18: note = phosphorothioate linkage
  misc_feature 18^19: note = phosphorothioate linkage
ggtttcaggattaatctca

SEQ ID NO: 472 - RNA, 19 nt, synthetic construct
  source 1..19: mol_type = other RNA
  misc_feature 1..19: note = Antisense: ETXS852; corresponding to SEQ ID NO: 232
  modified_base 1: mod_base = OTHER; note = 2'O-methyl-adenosine
  modified_base 2: mod_base = OTHER; note = 2' Fluoro-guanosine
  modified_base 3: mod_base = gm
  modified_base 4: mod_base = OTHER; note = 2'Fluoro-adenosine
  modified_base 5: mod_base = um
  modified_base 6: mod_base = OTHER; note = 2' Fluoro-uridine
  modified_base 7: mod_base = OTHER; note = 2'O-methyl-adenosine
  modified_base 8: mod_base = OTHER; note = 2'Fluoro-adenosine
  modified_base 9: mod_base = um
  modified_base 10: mod_base = OTHER; note = 2' Fluoro-cytidine
  modified_base 11: mod_base = um
  modified_base 12: mod_base = OTHER; note = 2' Fluoro-cytidine
  modified_base 13: mod_base = OTHER; note = 2'O-methyl-adenosine
  modified_base 14: mod_base = OTHER; note = 2' Fluoro-uridine
  modified_base 15: mod_base = cm
  modified_base 16: mod_base = OTHER; note = 2'Fluoro-adenosine
  modified_base 17: mod_base = OTHER; note = 2'O-methyl-adenosine
  modified_base 18: mod_base = OTHER; note = 2'Fluoro-adenosine
  modified_base 19: mod_base = cm
  misc_feature 1^2: note = phosphorothioate linkage
  misc_feature 2^3: note = phosphorothioate linkage
  misc_feature 17^18: note = phosphorothioate linkage
  misc_feature 18^19: note = phosphorothioate linkage
aggattaatctcatcaaac

SEQ ID NO: 473 - RNA, 19 nt, synthetic construct
  source 1..19: mol_type = other RNA
  misc_feature 1..19: note = Antisense: ETXS854; corresponding to SEQ ID NO: 233
  modified_base 1: mod_base = um
  modified_base 2: mod_base = OTHER; note = 2' Fluoro-cytidine
  modified_base 3: mod_base = cm
  modified_base 4: mod_base = OTHER; note = 2' Fluoro-uridine
  modified_base 5: mod_base = um
  modified_base 6: mod_base = OTHER; note = 2' Fluoro-guanosine
  modified_base 7: mod_base = um
  modified_base 8: mod_base = OTHER; note = 2' Fluoro-guanosine
  modified_base 9: mod_base = gm
  modified_base 10: mod_base = OTHER; note = 2'Fluoro-adenosine
  modified_base 11: mod_base = um
  modified_base 12: mod_base = OTHER; note = 2' Fluoro-guanosine
  modified_base 13: mod_base = OTHER; note = 2'O-methyl-adenosine
  modified_base 14: mod_base = OTHER; note = 2'Fluoro-adenosine
  modified_base 15: mod_base = gm
  modified_base 16: mod_base = OTHER; note = 2' Fluoro-guanosine
  modified_base 17: mod_base = cm
  modified_base 18: mod_base = OTHER; note = 2'Fluoro-adenosine
  modified_base 19: mod_base = OTHER; note = 2'O-methyl-adenosine
  misc_feature 1^2: note = phosphorothioate linkage
  misc_feature 2^3: note = phosphorothioate linkage
  misc_feature 17^18: note = phosphorothioate linkage
  misc_feature 18^19: note = phosphorothioate linkage
tccttgtggatgaaggcaa

SEQ ID NO: 474 - RNA, 19 nt, synthetic construct
  source 1..19: mol_type = other RNA
  misc_feature 1..19: note = Antisense: ETXS856; corresponding to SEQ ID NO: 234
  modified_base 1: mod_base = gm
  modified_base 2: mod_base = OTHER; note = 2' Fluoro-uridine
  modified_base 3: mod_base = gm
  modified_base 4: mod_base = OTHER; note = 2' Fluoro-cytidine
  modified_base 5: mod_base = cm
  modified_base 6: mod_base = OTHER; note = 2' Fluoro-uridine
  modified_base 7: mod_base = cm
  modified_base 8: mod_base = OTHER; note = 2'Fluoro-adenosine
  modified_base 9: mod_base = um
  modified_base 10: mod_base = OTHER; note = 2' Fluoro-guanosine
  modified_base 11: mod_base = gm
  modified_base 12: mod_base = OTHER; note = 2'Fluoro-adenosine
  modified_base 13: mod_base = gm
  modified_base 14: mod_base = OTHER; note = 2'Fluoro-adenosine
  modified_base 15: mod_base = um
  modified_base 16: mod_base = OTHER; note = 2' Fluoro-cytidine
  modified_base 17: mod_base = um
  modified_base 18: mod_base = OTHER; note = 2' Fluoro-uridine
  modified_base 19: mod_base = um
  misc_feature 1^2: note = phosphorothioate linkage
  misc_feature 2^3: note = phosphorothioate linkage
  misc_feature 17^18: note = phosphorothioate linkage
  misc_feature 18^19: note = phosphorothioate linkage
gtgcctcatggagatcttt

SEQ ID NO: 475 - RNA, 19 nt, synthetic construct
  source 1..19: mol_type = other RNA
  misc_feature 1..19: note = Antisense: ETXS858; corresponding to SEQ ID NO: 235
  modified_base 1: mod_base = um
  modified_base 2: mod_base = OTHER; note = 2' Fluoro-cytidine
  modified_base 3: mod_base = um
  modified_base 4: mod_base = OTHER; note = 2' Fluoro-cytidine
  modified_base 5: mod_base = cm
  modified_base 6: mod_base = OTHER; note = 2'Fluoro-adenosine
  modified_base 7: mod_base = um
  modified_base 8: mod_base = OTHER; note = 2' Fluoro-guanosine
  modified_base 9: mod_base = OTHER; note = 2'O-methyl-adenosine
  modified_base 10: mod_base = OTHER; note = 2' Fluoro-guanosine
  modified_base 11: mod_base = gm
  modified_base 12: mod_base = OTHER; note = 2'Fluoro-adenosine
  modified_base 13: mod_base = cm
  modified_base 14: mod_base = OTHER; note = 2' Fluoro-cytidine
  modified_base 15: mod_base = OTHER; note = 2'O-methyl-adenosine
  modified_base 16: mod_base = OTHER; note = 2' Fluoro-cytidine
  modified_base 17: mod_base = cm
  modified_base 18: mod_base = OTHER; note = 2'Fluoro-adenosine
  modified_base 19: mod_base = gm
  misc_feature 1^2: note = phosphorothioate linkage
  misc_feature 2^3: note = phosphorothioate linkage
  misc_feature 17^18: note = phosphorothioate linkage
  misc_feature 18^19: note = phosphorothioate linkage
tctccatgaggaccaccag

SEQ ID NO: 476 - RNA, 19 nt, synthetic construct
  source 1..19: mol_type = other RNA
  misc_feature 1..19: note = Antisense: ETXS860; corresponding to SEQ ID NO: 236
  modified_base 1: mod_base = cm
  modified_base 2: mod_base = OTHER; note = 2'Fluoro-adenosine
  modified_base 3: mod_base = OTHER; note = 2'O-methyl-adenosine
  modified_base 4: mod_base = OTHER; note = 2'Fluoro-adenosine
  modified_base 5: mod_base = OTHER; note = 2'O-methyl-adenosine
  modified_base 6: mod_base = OTHER; note = 2' Fluoro-uridine
  modified_base 7: mod_base = cm
  modified_base 8: mod_base = OTHER; note = 2' Fluoro-cytidine
  modified_base 9: mod_base = um
  modified_base 10: mod_base = OTHER; note = 2' Fluoro-uridine
  modified_base 11: mod_base = gm
  modified_base 12: mod_base = OTHER; note = 2' Fluoro-uridine
  modified_base 13: mod_base = gm
  modified_base 14: mod_base = OTHER; note = 2' Fluoro-guanosine
  modified_base 15: mod_base = OTHER; note = 2'O-methyl-adenosine
  modified_base 16: mod_base = OTHER; note = 2' Fluoro-uridine
  modified_base 17: mod_base = gm
  modified_base 18: mod_base = OTHER; note = 2'Fluoro-adenosine
  modified_base 19: mod_base = OTHER; note = 2'O-methyl-adenosine
  misc_feature 1^2: note = phosphorothioate linkage
  misc_feature 2^3: note = phosphorothioate linkage
  misc_feature 17^18: note = phosphorothioate linkage
  misc_feature 18^19: note = phosphorothioate linkage
caaaatccttgtggatgaa

SEQ ID NO: 477 - RNA, 19 nt, synthetic construct
  source 1..19: mol_type = other RNA
  misc_feature 1..19: note = Antisense: ETXS862; corresponding to SEQ ID NO: 237
  modified_base 1: mod_base = cm
  modified_base 2: mod_base = OTHER; note = 2' Fluoro-guanosine
  modified_base 3: mod_base = um
  modified_base 4: mod_base = OTHER; note = 2' Fluoro-guanosine
  modified_base 5: mod_base = cm
  modified_base 6: mod_base = OTHER; note = 2' Fluoro-cytidine
  modified_base 7: mod_base = um
  modified_base 8: mod_base = OTHER; note = 2' Fluoro-cytidine
  modified_base 9: mod_base = OTHER; note = 2'O-methyl-adenosine
  modified_base 10: mod_base = OTHER; note = 2' Fluoro-uridine
  modified_base 11: mod_base = gm
  modified_base 12: mod_base = OTHER; note = 2' Fluoro-guanosine
  modified_base 13: mod_base = OTHER; note = 2'O-methyl-adenosine
  modified_base 14: mod_base = OTHER; note = 2' Fluoro-guanosine
  modified_base 15: mod_base = OTHER; note = 2'O-methyl-adenosine
  modified_base 16: mod_base = OTHER; note = 2' Fluoro-uridine
  modified_base 17: mod_base = cm
  modified_base 18: mod_base = OTHER; note = 2' Fluoro-uridine
  modified_base 19: mod_base = um
  misc_feature 1^2: note = phosphorothioate linkage
  misc_feature 2^3: note = phosphorothioate linkage
  misc_feature 17^18: note = phosphorothioate linkage
  misc_feature 18^19: note = phosphorothioate linkage
cgtgcctcatggagatctt

SEQ ID NO: 478 - RNA, 19 nt, synthetic construct
  source 1..19: mol_type = other RNA
  misc_feature 1..19: note = Antisense: ETXS864; corresponding to SEQ ID NO: 238
  modified_base 1: mod_base = OTHER; note = 2'O-methyl-adenosine
  modified_base 2: mod_base = OTHER; note = 2' Fluoro-uridine
  modified_base 3: mod_base = cm
  modified_base 4: mod_base = OTHER; note = 2'Fluoro-adenosine
  modified_base 5: mod_base = OTHER; note = 2'O-methyl-adenosine
  modified_base 6: mod_base = OTHER; note = 2'Fluoro-adenosine
  modified_base 7: mod_base = OTHER; note = 2'O-methyl-adenosine
  modified_base 8: mod_base = OTHER; note = 2' Fluoro-uridine
  modified_base 9: mod_base = cm
  modified_base 10: mod_base = OTHER; note = 2' Fluoro-cytidine
  modified_base 11: mod_base = um
  modified_base 12: mod_base = OTHER; note = 2' Fluoro-uridine
  modified_base 13: mod_base = gm
  modified_base 14: mod_base = OTHER; note = 2' Fluoro-uridine
  modified_base 15: mod_base = gm
  modified_base 16: mod_base = OTHER; note = 2' Fluoro-guanosine
  modified_base 17: mod_base = OTHER; note = 2'O-methyl-adenosine
  modified_base 18: mod_base = OTHER; note = 2' Fluoro-uridine
  modified_base 19: mod_base = gm
  misc_feature 1^2: note = phosphorothioate linkage
  misc_feature 2^3: note = phosphorothioate linkage
  misc_feature 17^18: note = phosphorothioate linkage
  misc_feature 18^19: note = phosphorothioate linkage
atcaaaatccttgtggatg

SEQ ID NO: 479 - RNA, 19 nt, synthetic construct
  source 1..19: mol_type = other RNA
  misc_feature 1..19: note = Antisense: ETXS866; corresponding to SEQ ID NO: 239
  modified_base 1: mod_base = um
  modified_base 2: mod_base = OTHER; note = 2' Fluoro-uridine
  modified_base 3: mod_base = cm
  modified_base 4: mod_base = OTHER; note = 2'Fluoro-adenosine
  modified_base 5: mod_base = gm
  modified_base 6: mod_base = OTHER; note = 2' Fluoro-guanosine
  modified_base 7: mod_base = OTHER; note = 2'O-methyl-adenosine
  modified_base 8: mod_base = OTHER; note = 2' Fluoro-uridine
  modified_base 9: mod_base = um
  modified_base 10: mod_base = OTHER; note = 2'Fluoro-adenosine
  modified_base 11: mod_base = OTHER; note = 2'O-methyl-adenosine
  modified_base 12: mod_base = OTHER; note = 2' Fluoro-uridine
  modified_base 13: mod_base = cm
  modified_base 14: mod_base = OTHER; note = 2' Fluoro-uridine
  modified_base 15: mod_base = cm
  modified_base 16: mod_base = OTHER; note = 2'Fluoro-adenosine
  modified_base 17: mod_base = um
  modified_base 18: mod_base = OTHER; note = 2' Fluoro-cytidine
  modified_base 19: mod_base = OTHER; note = 2'O-methyl-adenosine
  misc_feature 1^2: note = phosphorothioate linkage
  misc_feature 2^3: note = phosphorothioate linkage
  misc_feature 17^18: note = phosphorothioate linkage
  misc_feature 18^19: note = phosphorothioate linkage
ttcaggattaatctcatca

SEQ ID NO: 480 - RNA, 19 nt, synthetic construct
  source 1..19: mol_type = other RNA
  misc_feature 1..19: note = Antisense: ETXS868; corresponding to SEQ ID NO: 240
  modified_base 1: mod_base = OTHER; note = 2'O-methyl-adenosine
  modified_base 2: mod_base = OTHER; note = 2'Fluoro-adenosine
  modified_base 3: mod_base = um
  modified_base 4: mod_base = OTHER; note = 2' Fluoro-cytidine
  modified_base 5: mod_base = cm
  modified_base 6: mod_base = OTHER; note = 2' Fluoro-uridine
  modified_base 7: mod_base = um
  modified_base 8: mod_base = OTHER; note = 2' Fluoro-guanosine
  modified_base 9: mod_base = um
  modified_base 10: mod_base = OTHER; note = 2' Fluoro-guanosine
  modified_base 11: mod_base = gm
  modified_base 12: mod_base = OTHER; note = 2'Fluoro-adenosine
  modified_base 13: mod_base = um
  modified_base 14: mod_base = OTHER; note = 2' Fluoro-guanosine
  modified_base 15: mod_base = OTHER; note = 2'O-methyl-adenosine
  modified_base 16: mod_base = OTHER; note = 2'Fluoro-adenosine
  modified_base 17: mod_base = gm
  modified_base 18: mod_base = OTHER; note = 2' Fluoro-guanosine
  modified_base 19: mod_base = cm
  misc_feature 1^2: note = phosphorothioate linkage
  misc_feature 2^3: note = phosphorothioate linkage
  misc_feature 17^18: note = phosphorothioate linkage
  misc_feature 18^19: note = phosphorothioate linkage
aatccttgtggatgaaggc

SEQ ID NO: 481 - RNA, 19 nt, synthetic construct
  source 1..19: mol_type = other RNA
  misc_feature 1..19: note = Antisense: ETXS870; corresponding to SEQ ID NO: 241
  modified_base 1: mod_base = cm
  modified_base 2: mod_base = OTHER; note = 2' Fluoro-cytidine
  modified_base 3: mod_base = OTHER; note = 2'O-methyl-adenosine
  modified_base 4: mod_base = OTHER; note = 2' Fluoro-uridine
  modified_base 5: mod_base = cm
  modified_base 6: mod_base = OTHER; note = 2' Fluoro-guanosine
  modified_base 7: mod_base = um
  modified_base 8: mod_base = OTHER; note = 2' Fluoro-guanosine
  modified_base 9: mod_base = cm
  modified_base 10: mod_base = OTHER; note = 2' Fluoro-cytidine
  modified_base 11: mod_base = um
  modified_base 12: mod_base = OTHER; note = 2' Fluoro-cytidine
  modified_base 13: mod_base = OTHER; note = 2'O-methyl-adenosine
  modified_base 14: mod_base = OTHER; note = 2' Fluoro-uridine
  modified_base 15: mod_base = gm
  modified_base 16: mod_base = OTHER; note = 2' Fluoro-guanosine
  modified_base 17: mod_base = OTHER; note = 2'O-methyl-adenosine
  modified_base 18: mod_base = OTHER; note = 2' Fluoro-guanosine
  modified_base 19: mod_base = OTHER; note = 2'O-methyl-adenosine
  misc_feature 1^2: note = phosphorothioate linkage
  misc_feature 2^3: note = phosphorothioate linkage
  misc_feature 17^18: note = phosphorothioate linkage
  misc_feature 18^19: note = phosphorothioate linkage
ccatcgtgcctcatggaga

SEQ ID NO: 482 - RNA, 23 nt, synthetic construct
  source 1..23: mol_type = other RNA
  misc_feature 1..23: note = Antisense: ETXS872; corresponding to SEQ ID NO: 122
  modified_base 1: mod_base = OTHER; note = 2'O-methyl-adenosine
  modified_base 2: mod_base = OTHER; note = 2'Fluoro-adenosine
  modified_base 3: mod_base = OTHER; note = 2'O-methyl-adenosine
  modified_base 4: mod_base = OTHER; note = 2' Fluoro-uridine
  modified_base 5: mod_base = cm
  modified_base 6: mod_base = OTHER; note = 2' Fluoro-cytidine
  modified_base 7: mod_base = um
  modified_base 8: mod_base = OTHER; note = 2' Fluoro-uridine
  modified_base 9: mod_base = OTHER; note = 2' Fluoro-guanosine
  modified_base 10: mod_base = um
  modified_base 11: mod_base = gm
  modified_base 12: mod_base = gm
  modified_base 13: mod_base = OTHER; note = 2'O-methyl-adenosine
  modified_base 14: mod_base = OTHER; note = 2' Fluoro-uridine
  modified_base 15: mod_base = gm
  modified_base 16: mod_base = OTHER; note = 2'Fluoro-adenosine
  modified_base 17: mod_base = OTHER; note = 2'O-methyl-adenosine
  modified_base 18: mod_base = gm
  modified_base 19: mod_base = gm
  modified_base 20: mod_base = cm
  modified_base 21: mod_base = OTHER; note = 2'O-methyl-adenosine
  modified_base 22: mod_base = OTHER; note = 2'O-methyl-adenosine
  modified_base 23: mod_base = OTHER; note = 2'O-methyl-adenosine
  misc_feature 1^2: note = phosphorothioate linkage
  misc_feature 2^3: note = phosphorothioate linkage
  misc_feature 21^22: note = phosphorothioate linkage
  misc_feature 22^23: note = phosphorothioate linkage
aaatccttgtggatgaaggcaaa

SEQ ID NO: 483 - RNA, 23 nt, synthetic construct
  source 1..23: mol_type = other RNA
  misc_feature 1..23: note = Antisense: ETXS874; corresponding to SEQ ID NO: 123
  modified_base 1: mod_base = gm
  modified_base 2: mod_base = OTHER; note = 2' Fluoro-cytidine
  modified_base 3: mod_base = cm
  modified_base 4: mod_base = OTHER; note = 2' Fluoro-uridine
  modified_base 5: mod_base = cm
  modified_base 6: mod_base = OTHER; note = 2'Fluoro-adenosine
  modified_base 7: mod_base = um
  modified_base 8: mod_base = OTHER; note = 2' Fluoro-guanosine
  modified_base 9: mod_base = OTHER; note = 2' Fluoro-guanosine
  modified_base 10: mod_base = OTHER; note = 2'O-methyl-adenosine
  modified_base 11: mod_base = gm
  modified_base 12: mod_base = OTHER; note = 2'O-methyl-adenosine
  modified_base 13: mod_base = um
  modified_base 14: mod_base = OTHER; note = 2' Fluoro-cytidine
  modified_base 15: mod_base = um
  modified_base 16: mod_base = OTHER; note = 2' Fluoro-uridine
  modified_base 17: mod_base = um
  modified_base 18: mod_base = cm
  modified_base 19: mod_base = gm
  modified_base 20: mod_base = cm
  modified_base 21: mod_base = OTHER; note = 2'O-methyl-adenosine
  modified_base 22: mod_base = gm
  modified_base 23: mod_base = cm
  misc_feature 1^2: note = phosphorothioate linkage
  misc_feature 2^3: note = phosphorothioate linkage
  misc_feature 21^22: note = phosphorothioate linkage
  misc_feature 22^23: note = phosphorothioate linkage
gcctcatggagatctttcgcagc

SEQ ID NO: 484 - RNA, 23 nt, synthetic construct
  source 1..23: mol_type = other RNA
  misc_feature 1..23: note = Antisense: ETXS876; corresponding to SEQ ID NO: 124
  modified_base 1: mod_base = um
  modified_base 2: mod_base = OTHER; note = 2' Fluoro-uridine
  modified_base 3: mod_base = cm
  modified_base 4: mod_base = OTHER; note = 2' Fluoro-uridine
  modified_base 5: mod_base = cm
  modified_base 6: mod_base = OTHER; note = 2' Fluoro-cytidine
  modified_base 7: mod_base = OTHER; note = 2'O-methyl-adenosine
  modified_base 8: mod_base = OTHER; note = 2' Fluoro-uridine
  modified_base 9: mod_base = OTHER; note = 2' Fluoro-guanosine
  modified_base 10: mod_base = OTHER; note = 2'O-methyl-adenosine
  modified_base 11: mod_base = gm
  modified_base 12: mod_base = gm
  modified_base 13: mod_base = OTHER; note = 2'O-methyl-adenosine
  modified_base 14: mod_base = OTHER; note = 2' Fluoro-cytidine
  modified_base 15: mod_base = cm
  modified_base 16: mod_base = OTHER; note = 2'Fluoro-adenosine
  modified_base 17: mod_base = cm
  modified_base 18: mod_base = cm
  modified_base 19: mod_base = OTHER; note = 2'O-methyl-adenosine
  modified_base 20: mod_base = gm
  modified_base 21: mod_base = cm
  modified_base 22: mod_base = OTHER; note = 2'O-methyl-adenosine
  modified_base 23: mod_base = um
  misc_feature 1^2: note = phosphorothioate linkage
  misc_feature 2^3: note = phosphorothioate linkage
  misc_feature 21^22: note = phosphorothioate linkage
  misc_feature 22^23: note = phosphorothioate linkage
ttctccatgaggaccaccagcat

SEQ ID NO: 485 - RNA, 23 nt, synthetic construct
  source 1..23: mol_type = other RNA
  misc_feature 1..23: note = Antisense: ETXS878; corresponding to SEQ ID NO: 125
  modified_base 1: mod_base = um
  modified_base 2: mod_base = OTHER; note = 2' Fluoro-guanosine
  modified_base 3: mod_base = cm
  modified_base 4: mod_base = OTHER; note = 2' Fluoro-cytidine
  modified_base 5: mod_base = um
  modified_base 6: mod_base = OTHER; note = 2' Fluoro-cytidine
  modified_base 7: mod_base = OTHER; note = 2'O-methyl-adenosine
  modified_base 8: mod_base = OTHER; note = 2' Fluoro-uridine
  modified_base 9: mod_base = OTHER; note = 2' Fluoro-guanosine
  modified_base 10: mod_base = gm
  modified_base 11: mod_base = OTHER; note = 2'O-methyl-adenosine
  modified_base 12: mod_base = gm
  modified_base 13: mod_base = OTHER; note = 2'O-methyl-adenosine
  modified_base 14: mod_base = OTHER; note = 2' Fluoro-uridine
  modified_base 15: mod_base = cm
  modified_base 16: mod_base = OTHER; note = 2' Fluoro-uridine
  modified_base 17: mod_base = um
  modified_base 18: mod_base = um
  modified_base 19: mod_base = cm
  modified_base 20: mod_base = gm
  modified_base 21: mod_base = cm
  modified_base 22: mod_base = OTHER; note = 2'O-methyl-adenosine
  modified_base 23: mod_base = gm
  misc_feature 1^2: note = phosphorothioate linkage
  misc_feature 2^3: note = phosphorothioate linkage
  misc_feature 21^22: note = phosphorothioate linkage
  misc_feature 22^23: note = phosphorothioate linkage
tgcctcatggagatctttcgcag

SEQ ID NO: 486 - RNA, 23 nt, synthetic construct
  source 1..23: mol_type = other RNA
  misc_feature 1..23: note = Antisense: ETXS880; corresponding to SEQ ID NO: 126
  modified_base 1: mod_base = OTHER; note = 2'O-methyl-adenosine
  modified_base 2: mod_base = OTHER; note = 2' Fluoro-guanosine
  modified_base 3: mod_base = cm
  modified_base 4: mod_base = OTHER; note = 2'Fluoro-adenosine
  modified_base 5: mod_base = gm
  modified_base 6: mod_base = OTHER; note = 2' Fluoro-cytidine
  modified_base 7: mod_base = um
  modified_base 8: mod_base = OTHER; note = 2' Fluoro-cytidine
  modified_base 9: mod_base = OTHER; note = 2'Fluoro-adenosine
  modified_base 10: mod_base = um
  modified_base 11: mod_base = gm
  modified_base 12: mod_base = cm
  modified_base 13: mod_base = OTHER; note = 2'O-methyl-adenosine
  modified_base 14: mod_base = OTHER; note = 2' Fluoro-uridine
  modified_base 15: mod_base = cm
  modified_base 16: mod_base = OTHER; note = 2' Fluoro-uridine
  modified_base 17: mod_base = cm
  modified_base 18: mod_base = OTHER; note = 2'O-methyl-adenosine
  modified_base 19: mod_base = um
  modified_base 20: mod_base = OTHER; note = 2'O-methyl-adenosine
  modified_base 21: mod_base = cm
  modified_base 22: mod_base = um
  modified_base 23: mod_base = um
  misc_feature 1^2: note = phosphorothioate linkage
  misc_feature 2^3: note = phosphorothioate linkage
  misc_feature 21^22: note = phosphorothioate linkage
  misc_feature 22^23: note = phosphorothioate linkage
agcagctcatgcatctcatactt

SEQ ID NO: 487 - RNA, 23 nt, synthetic construct
  source 1..23: mol_type = other RNA
  misc_feature 1..23: note = Antisense: ETXS882; corresponding to SEQ ID NO: 127
  modified_base 1: mod_base = um
  modified_base 2: mod_base = OTHER; note = 2' Fluoro-cytidine
  modified_base 3: mod_base = OTHER; note = 2'O-methyl-adenosine
  modified_base 4: mod_base = OTHER; note = 2' Fluoro-guanosine
  modified_base 5: mod_base = gm
  modified_base 6: mod_base = OTHER; note = 2'Fluoro-adenosine
  modified_base 7: mod_base = um
  modified_base 8: mod_base = OTHER; note = 2' Fluoro-uridine
  modified_base 9: mod_base = OTHER; note = 2'Fluoro-adenosine
  modified_base 10: mod_base = OTHER; note = 2'O-methyl-adenosine
  modified_base 11: mod_base = um
  modified_base 12: mod_base = cm
  modified_base 13: mod_base = um
  modified_base 14: mod_base = OTHER; note = 2' Fluoro-cytidine
  modified_base 15: mod_base = OTHER; note = 2'O-methyl-adenosine
  modified_base 16: mod_base = OTHER; note = 2' Fluoro-uridine
  modified_base 17: mod_base = cm
  modified_base 18: mod_base = OTHER; note = 2'O-methyl-adenosine
  modified_base 19: mod_base = OTHER; note = 2'O-methyl-adenosine
  modified_base 20: mod_base = OTHER; note = 2'O-methyl-adenosine
  modified_base 21: mod_base = cm
  modified_base 22: mod_base = OTHER; note = 2'O-methyl-adenosine
  modified_base 23: mod_base = gm
  misc_feature 1^2: note = phosphorothioate linkage
  misc_feature 2^3: note = phosphorothioate linkage
  misc_feature 21^22: note = phosphorothioate linkage
  misc_feature 22^23: note = phosphorothioate linkage
tcaggattaatctcatcaaacag

SEQ ID NO: 488 - RNA, 23 nt, synthetic construct
  source 1..23: mol_type = other RNA
  misc_feature 1..23: note = Antisense: ETXS884; corresponding to SEQ ID NO: 128
  modified_base 1: mod_base = um
  modified_base 2: mod_base = OTHER; note = 2' Fluoro-uridine
  modified_base 3: mod_base = gm
  modified_base 4: mod_base = OTHER; note = 2' Fluoro-guanosine
  modified_base 5: mod_base = um
  modified_base 6: mod_base = OTHER; note = 2' Fluoro-uridine
  modified_base 7: mod_base = um
  modified_base 8: mod_base = OTHER; note = 2' Fluoro-cytidine
  modified_base 9: mod_base = OTHER; note = 2'Fluoro-adenosine
  modified_base 10: mod_base = gm
  modified_base 11: mod_base = gm
  modified_base 12: mod_base = OTHER; note = 2'O-methyl-adenosine
  modified_base 13: mod_base = um
  modified_base 14: mod_base = OTHER; note = 2' Fluoro-uridine
  modified_base 15: mod_base = OTHER; note = 2'O-methyl-adenosine
  modified_base 16: mod_base = OTHER; note = 2'Fluoro-adenosine
  modified_base 17: mod_base = um
  modified_base 18: mod_base = cm
  modified_base 19: mod_base = um
  modified_base 20: mod_base = cm
  modified_base 21: mod_base = OTHER; note = 2'O-methyl-adenosine
  modified_base 22: mod_base = um
  modified_base 23: mod_base = cm
  misc_feature 1^2: note = phosphorothioate linkage
  misc_feature 2^3: note = phosphorothioate linkage
  misc_feature 21^22: note = phosphorothioate linkage
  misc_feature 22^23: note = phosphorothioate linkage
ttggtttcaggattaatctcatc

SEQ ID NO: 489 - RNA, 23 nt, synthetic construct
  source 1..23: mol_type = other RNA
  misc_feature 1..23: note = Antisense: ETXS886; corresponding to SEQ ID NO: 129
  modified_base 1: mod_base = gm
  modified_base 2: mod_base = OTHER; note = 2' Fluoro-uridine
  modified_base 3: mod_base = um
  modified_base 4: mod_base = OTHER; note = 2' Fluoro-uridine
  modified_base 5: mod_base = cm
  modified_base 6: mod_base = OTHER; note = 2'Fluoro-adenosine
  modified_base 7: mod_base = gm
  modified_base 8: mod_base = OTHER; note = 2' Fluoro-guanosine
  modified_base 9: mod_base = OTHER; note = 2'Fluoro-adenosine
  modified_base 10: mod_base = um
  modified_base 11: mod_base = um
  modified_base 12: mod_base = OTHER; note = 2'O-methyl-adenosine
  modified_base 13: mod_base = OTHER; note = 2'O-methyl-adenosine
  modified_base 14: mod_base = OTHER; note = 2' Fluoro-uridine
  modified_base 15: mod_base = cm
  modified_base 16: mod_base = OTHER; note = 2' Fluoro-uridine
  modified_base 17: mod_base = cm
  modified_base 18: mod_base = OTHER; note = 2'O-methyl-adenosine
  modified_base 19: mod_base = um
  modified_base 20: mod_base = cm
  modified_base 21: mod_base = OTHER; note = 2'O-methyl-adenosine
  modified_base 22: mod_base = OTHER; note = 2'O-methyl-adenosine
  modified_base 23: mod_base = OTHER; note = 2'O-methyl-adenosine
  misc_feature 1^2: note = phosphorothioate linkage
  misc_feature 2^3: note = phosphorothioate linkage
  misc_feature 21^22: note = phosphorothioate linkage
  misc_feature 22^23: note = phosphorothioate linkage
gtttcaggattaatctcatcaaa

SEQ ID NO: 490 - RNA, 23 nt, synthetic construct
  source 1..23: mol_type = other RNA
  misc_feature 1..23: note = Antisense: ETXS888; corresponding to SEQ ID NO: 130
  modified_base 1: mod_base = um
  modified_base 2: mod_base = OTHER; note = 2' Fluoro-guanosine
  modified_base 3: mod_base = gm
  modified_base 4: mod_base = OTHER; note = 2' Fluoro-uridine
  modified_base 5: mod_base = um
  modified_base 6: mod_base = OTHER; note = 2' Fluoro-uridine
  modified_base 7: mod_base = cm
  modified_base 8: mod_base = OTHER; note = 2'Fluoro-adenosine
  modified_base 9: mod_base = OTHER; note = 2' Fluoro-guanosine
  modified_base 10: mod_base = gm
  modified_base 11: mod_base = OTHER; note = 2'O-methyl-adenosine
  modified_base 12: mod_base = um
  modified_base 13: mod_base = um
  modified_base 14: mod_base = OTHER; note = 2'Fluoro-adenosine
  modified_base 15: mod_base = OTHER; note = 2'O-methyl-adenosine
  modified_base 16: mod_base = OTHER; note = 2' Fluoro-uridine
  modified_base 17: mod_base = cm
  modified_base 18: mod_base = um
  modified_base 19: mod_base = cm
  modified_base 20: mod_base = OTHER; note = 2'O-methyl-adenosine
  modified_base 21: mod_base = um
  modified_base 22: mod_base = cm
  modified_base 23: mod_base = OTHER; note = 2'O-methyl-adenosine
  misc_feature 1^2: note = phosphorothioate linkage
  misc_feature 2^3: note = phosphorothioate linkage
  misc_feature 21^22: note = phosphorothioate linkage
  misc_feature 22^23: note = phosphorothioate linkage
tggtttcaggattaatctcatca

SEQ ID NO: 491 - RNA, 23 nt, synthetic construct
  source 1..23: mol_type = other RNA
  misc_feature 1..23: note = Antisense: ETXS890; corresponding to SEQ ID NO: 131
  modified_base 1: mod_base = gm
  modified_base 2: mod_base = OTHER; note = 2' Fluoro-guanosine
  modified_base 3: mod_base = um
  modified_base 4: mod_base = OTHER; note = 2' Fluoro-uridine
  modified_base 5: mod_base = um
  modified_base 6: mod_base = OTHER; note = 2' Fluoro-cytidine
  modified_base 7: mod_base = OTHER; note = 2'O-methyl-adenosine
  modified_base 8: mod_base = OTHER; note = 2' Fluoro-guanosine
  modified_base 9: mod_base = OTHER; note = 2' Fluoro-guanosine
  modified_base 10: mod_base = OTHER; note = 2'O-methyl-adenosine
  modified_base 11: mod_base = um
  modified_base 12: mod_base = um
  modified_base 13: mod_base = OTHER; note = 2'O-methyl-adenosine
  modified_base 14: mod_base = OTHER; note = 2'Fluoro-adenosine
  modified_base 15: mod_base = um
  modified_base 16: mod_base = OTHER; note = 2' Fluoro-cytidine
  modified_base 17: mod_base = um
  modified_base 18: mod_base = cm
  modified_base 19: mod_base = OTHER; note = 2'O-methyl-adenosine
  modified_base 20: mod_base = um
  modified_base 21: mod_base = cm
  modified_base 22: mod_base = OTHER; note = 2'O-methyl-adenosine
  modified_base 23: mod_base = OTHER; note = 2'O-methyl-adenosine
  misc_feature 1^2: note = phosphorothioate linkage
  misc_feature 2^3: note = phosphorothioate linkage
  misc_feature 21^22: note = phosphorothioate linkage
  misc_feature 22^23: note = phosphorothioate linkage
ggtttcaggattaatctcatcaa

SEQ ID NO: 492 - RNA, 23 nt, synthetic construct
  source 1..23: mol_type = other RNA
  misc_feature 1..23: note = Antisense: ETXS892; corresponding to SEQ ID NO: 132
  modified_base 1: mod_base = OTHER; note = 2'O-methyl-adenosine
  modified_base 2: mod_base = OTHER; note = 2' Fluoro-guanosine
  modified_base 3: mod_base = gm
  modified_base 4: mod_base = OTHER; note = 2'Fluoro-adenosine
  modified_base 5: mod_base = um
  modified_base 6: mod_base = OTHER; note = 2' Fluoro-uridine
  modified_base 7: mod_base = OTHER; note = 2'O-methyl-adenosine
  modified_base 8: mod_base = OTHER; note = 2'Fluoro-adenosine
  modified_base 9: mod_base = OTHER; note = 2' Fluoro-uridine
  modified_base 10: mod_base = cm
  modified_base 11: mod_base = um
  modified_base 12: mod_base = cm
  modified_base 13: mod_base = OTHER; note = 2'O-methyl-adenosine
  modified_base 14: mod_base = OTHER; note = 2' Fluoro-uridine
  modified_base 15: mod_base = cm
  modified_base 16: mod_base = OTHER; note = 2'Fluoro-adenosine
  modified_base 17: mod_base = OTHER; note = 2'O-methyl-adenosine
  modified_base 18: mod_base = OTHER; note = 2'O-methyl-adenosine
  modified_base 19: mod_base = cm
  modified_base 20: mod_base = OTHER; note = 2'O-methyl-adenosine
  modified_base 21: mod_base = gm
  modified_base 22: mod_base = um
  modified_base 23: mod_base = um
  misc_feature 1^2: note = phosphorothioate linkage
  misc_feature 2^3: note = phosphorothioate linkage
  misc_feature 21^22: note = phosphorothioate linkage
  misc_feature 22^23: note = phosphorothioate linkage
aggattaatctcatcaaacagtt

SEQ ID NO: 493 - RNA, 23 nt, synthetic construct
  source 1..23: mol_type = other RNA
  misc_feature 1..23: note = Antisense: ETXS894; corresponding to SEQ ID NO: 133
  modified_base 1: mod_base = um
  modified_base 2: mod_base = OTHER; note = 2' Fluoro-cytidine
  modified_base 3: mod_base = cm
  modified_base 4: mod_base = OTHER; note = 2' Fluoro-uridine
  modified_base 5: mod_base = um
  modified_base 6: mod_base = OTHER; note = 2' Fluoro-guanosine
  modified_base 7: mod_base = um
  modified_base 8: mod_base = OTHER; note = 2' Fluoro-guanosine
  modified_base 9: mod_base = OTHER; note = 2' Fluoro-guanosine
  modified_base 10: mod_base = OTHER; note = 2'O-methyl-adenosine
  modified_base 11: mod_base = um
  modified_base 12: mod_base = gm
  modified_base 13: mod_base = OTHER; note = 2'O-methyl-adenosine
  modified_base 14: mod_base = OTHER; note = 2'Fluoro-adenosine
  modified_base 15: mod_base = gm
  modified_base 16: mod_base = OTHER; note = 2' Fluoro-guanosine
  modified_base 17: mod_base = cm
  modified_base 18: mod_base = OTHER; note = 2'O-methyl-adenosine
  modified_base 19: mod_base = OTHER; note = 2'O-methyl-adenosine
  modified_base 20: mod_base = OTHER; note = 2'O-methyl-adenosine
  modified_base 21: mod_base = OTHER; note = 2'O-methyl-adenosine
  modified_base 22: mod_base = cm
  modified_base 23: mod_base = um
  misc_feature 1^2: note = phosphorothioate linkage
  misc_feature 2^3: note = phosphorothioate linkage
  misc_feature 21^22: note = phosphorothioate linkage
  misc_feature 22^23: note = phosphorothioate linkage
tccttgtggatgaaggcaaaact

SEQ ID NO: 494 - RNA, 23 nt, synthetic construct
  source 1..23: mol_type = other RNA
  misc_feature 1..23: note = Antisense: ETXS896; corresponding to SEQ ID NO: 134
  modified_base 1: mod_base = gm
  modified_base 2: mod_base = OTHER; note = 2' Fluoro-uridine
  modified_base 3: mod_base = gm
  modified_base 4: mod_base = OTHER; note = 2' Fluoro-cytidine
  modified_base 5: mod_base = cm
  modified_base 6: mod_base = OTHER; note = 2' Fluoro-uridine
  modified_base 7: mod_base = cm
  modified_base 8: mod_base = OTHER; note = 2'Fluoro-adenosine
  modified_base 9: mod_base = OTHER; note = 2' Fluoro-uridine
  modified_base 10: mod_base = gm
  modified_base 11: mod_base = gm
  modified_base 12: mod_base = OTHER; note = 2'O-methyl-adenosine
  modified_base 13: mod_base = gm
  modified_base 14: mod_base = OTHER; note = 2'Fluoro-adenosine
  modified_base 15: mod_base = um
  modified_base 16: mod_base = OTHER; note = 2' Fluoro-cytidine
  modified_base 17: mod_base = um
  modified_base 18: mod_base = um
  modified_base 19: mod_base = um
  modified_base 20: mod_base = cm
  modified_base 21: mod_base = gm
  modified_base 22: mod_base = cm
  modified_base 23: mod_base = OTHER; note = 2'O-methyl-adenosine
  misc_feature 1^2: note = phosphorothioate linkage
  misc_feature 2^3: note = phosphorothioate linkage
  misc_feature 21^22: note = phosphorothioate linkage
  misc_feature 22^23: note = phosphorothioate linkage
gtgcctcatggagatctttcgca

SEQ ID NO: 495 - RNA, 23 nt, synthetic construct
  source 1..23: mol_type = other RNA
  misc_feature 1..23: note = Antisense: ETXS898; corresponding to SEQ ID NO: 135
  modified_base 1: mod_base = um
  modified_base 2: mod_base = OTHER; note = 2' Fluoro-cytidine
  modified_base 3: mod_base = um
  modified_base 4: mod_base = OTHER; note = 2' Fluoro-cytidine
  modified_base 5: mod_base = cm
  modified_base 6: mod_base = OTHER; note = 2'Fluoro-adenosine
  modified_base 7: mod_base = um
  modified_base 8: mod_base = OTHER; note = 2' Fluoro-guanosine
  modified_base 9: mod_base = OTHER; note = 2'Fluoro-adenosine
  modified_base 10: mod_base = gm
  modified_base 11: mod_base = gm
  modified_base 12: mod_base = OTHER; note = 2'O-methyl-adenosine
  modified_base 13: mod_base = cm
  modified_base 14: mod_base = OTHER; note = 2' Fluoro-cytidine
  modified_base 15: mod_base = OTHER; note = 2'O-methyl-adenosine
  modified_base 16: mod_base = OTHER; note = 2' Fluoro-cytidine
  modified_base 17: mod_base = cm
  modified_base 18: mod_base = OTHER; note = 2'O-methyl-adenosine
  modified_base 19: mod_base = gm
  modified_base 20: mod_base = cm
  modified_base 21: mod_base = OTHER; note = 2'O-methyl-adenosine
  modified_base 22: mod_base = um
  modified_base 23: mod_base = gm
  misc_feature 1^2: note = phosphorothioate linkage
  misc_feature 2^3: note = phosphorothioate linkage
  misc_feature 21^22: note = phosphorothioate linkage
  misc_feature 22^23: note = phosphorothioate linkage
tctccatgaggaccaccagcatg

SEQ ID NO: 496 - RNA, 23 nt, synthetic construct
  source 1..23: mol_type = other RNA
  misc_feature 1..23: note = Antisense: ETXS900; corresponding to SEQ ID NO: 136
  modified_base 1: mod_base = cm
  modified_base 2: mod_base = OTHER; note = 2'Fluoro-adenosine
  modified_base 3: mod_base = OTHER; note = 2'O-methyl-adenosine
  modified_base 4: mod_base = OTHER; note = 2'Fluoro-adenosine
  modified_base 5: mod_base = OTHER; note = 2'O-methyl-adenosine
  modified_base 6: mod_base = OTHER; note = 2' Fluoro-uridine
  modified_base 7: mod_base = cm
  modified_base 8: mod_base = OTHER; note = 2' Fluoro-cytidine
  modified_base 9: mod_base = OTHER; note = 2' Fluoro-uridine
  modified_base 10: mod_base = um
  modified_base 11: mod_base = gm
  modified_base 12: mod_base = um
  modified_base 13: mod_base = gm
  modified_base 14: mod_base = OTHER; note = 2' Fluoro-guanosine
  modified_base 15: mod_base = OTHER; note = 2'O-methyl-adenosine
  modified_base 16: mod_base = OTHER; note = 2' Fluoro-uridine
  modified_base 17: mod_base = gm
  modified_base 18: mod_base = OTHER; note = 2'O-methyl-adenosine
  modified_base 19: mod_base = OTHER; note = 2'O-methyl-adenosine
  modified_base 20: mod_base = gm
  modified_base 21: mod_base = gm
  modified_base 22: mod_base = cm
  modified_base 23: mod_base = OTHER; note = 2'O-methyl-adenosine
  misc_feature 1^2: note = phosphorothioate linkage
  misc_feature 2^3: note = phosphorothioate linkage
  misc_feature 21^22: note = phosphorothioate linkage
  misc_feature 22^23: note = phosphorothioate linkage
caaaatccttgtggatgaaggca

SEQ ID NO: 497 - RNA, 23 nt, synthetic construct
  source 1..23: mol_type = other RNA
  misc_feature 1..23: note = Antisense: ETXS902; corresponding to SEQ ID NO: 137
  modified_base 1: mod_base = cm
  modified_base 2: mod_base = OTHER; note = 2' Fluoro-guanosine
  modified_base 3: mod_base = um
  modified_base 4: mod_base = OTHER; note = 2' Fluoro-guanosine
  modified_base 5: mod_base = cm
  modified_base 6: mod_base = OTHER; note = 2' Fluoro-cytidine
  modified_base 7: mod_base = um
  modified_base 8: mod_base = OTHER; note = 2' Fluoro-cytidine
  modified_base 9: mod_base = OTHER; note = 2'Fluoro-adenosine
  modified_base 10: mod_base = um
  modified_base 11: mod_base = gm
  modified_base 12: mod_base = gm
  modified_base 13: mod_base = OTHER; note = 2'O-methyl-adenosine
  modified_base 14: mod_base = OTHER; note = 2' Fluoro-guanosine
  modified_base 15: mod_base = OTHER; note = 2'O-methyl-adenosine
  modified_base 16: mod_base = OTHER; note = 2' Fluoro-uridine
  modified_base 17: mod_base = cm
  modified_base 18: mod_base = um
  modified_base 19: mod_base = um
  modified_base 20: mod_base = um
  modified_base 21: mod_base = cm
  modified_base 22: mod_base = gm
  modified_base 23: mod_base = cm
  misc_feature 1^2: note = phosphorothioate linkage
  misc_feature 2^3: note = phosphorothioate linkage
  misc_feature 21^22: note = phosphorothioate linkage
  misc_feature 22^23: note = phosphorothioate linkage
cgtgcctcatggagatctttcgc

SEQ ID NO: 498 - RNA, 23 nt, synthetic construct
  source 1..23: mol_type = other RNA
  misc_feature 1..23: note = Antisense: ETXS904; corresponding to SEQ ID NO: 138
  modified_base 1: mod_base = OTHER; note = 2'O-methyl-adenosine
  modified_base 2: mod_base = OTHER; note = 2' Fluoro-uridine
  modified_base 3: mod_base = cm
  modified_base 4: mod_base = OTHER; note = 2'Fluoro-adenosine
  modified_base 5: mod_base = OTHER; note = 2'O-methyl-adenosine
  modified_base 6: mod_base = OTHER; note = 2'Fluoro-adenosine
  modified_base 7: mod_base = OTHER; note = 2'O-methyl-adenosine
  modified_base 8: mod_base = OTHER; note = 2' Fluoro-uridine
  modified_base 9: mod_base = OTHER; note = 2' Fluoro-cytidine
  modified_base 10: mod_base = cm
  modified_base 11: mod_base = um
  modified_base 12: mod_base = um
  modified_base 13: mod_base = gm
  modified_base 14: mod_base = OTHER; note = 2' Fluoro-uridine
  modified_base 15: mod_base = gm
  modified_base 16: mod_base = OTHER; note = 2' Fluoro-guanosine
  modified_base 17: mod_base = OTHER; note = 2'O-methyl-adenosine
  modified_base 18: mod_base = um
  modified_base 19: mod_base = gm
  modified_base 20: mod_base = OTHER; note = 2'O-methyl-adenosine
  modified_base 21: mod_base = OTHER; note = 2'O-methyl-adenosine
  modified_base 22: mod_base = gm
  modified_base 23: mod_base = gm
  misc_feature 1^2: note = phosphorothioate linkage
  misc_feature 2^3: note = phosphorothioate linkage
  misc_feature 21^22: note = phosphorothioate linkage
  misc_feature 22^23: note = phosphorothioate linkage
atcaaaatccttgtggatgaagg

SEQ ID NO: 499 - RNA, 23 nt, synthetic construct
  source 1..23: mol_type = other RNA
  misc_feature 1..23: note = Antisense: ETXS906; corresponding to SEQ ID NO: 139
  modified_base 1: mod_base = um
  modified_base 2: mod_base = OTHER; note = 2' Fluoro-uridine
  modified_base 3: mod_base = cm
  modified_base 4: mod_base = OTHER; note = 2'Fluoro-adenosine
  modified_base 5: mod_base = gm
  modified_base 6: mod_base = OTHER; note = 2' Fluoro-guanosine
  modified_base 7: mod_base = OTHER; note = 2'O-methyl-adenosine
  modified_base 8: mod_base = OTHER; note = 2' Fluoro-uridine
  modified_base 9: mod_base = OTHER; note = 2' Fluoro-uridine
  modified_base 10: mod_base = OTHER; note = 2'O-methyl-adenosine
  modified_base 11: mod_base = OTHER; note = 2'O-methyl-adenosine
  modified_base 12: mod_base = um
  modified_base 13: mod_base = cm
  modified_base 14: mod_base = OTHER; note = 2' Fluoro-uridine
  modified_base 15: mod_base = cm
  modified_base 16: mod_base = OTHER; note = 2'Fluoro-adenosine
  modified_base 17: mod_base = um
  modified_base 18: mod_base = cm
  modified_base 19: mod_base = OTHER; note = 2'O-methyl-adenosine
  modified_base 20: mod_base = OTHER; note = 2'O-methyl-adenosine
  modified_base 21: mod_base = OTHER; note = 2'O-methyl-adenosine
  modified_base 22: mod_base = cm
  modified_base 23: mod_base = OTHER; note = 2'O-methyl-adenosine
  misc_feature 1^2: note = phosphorothioate linkage
  misc_feature 2^3: note = phosphorothioate linkage
  misc_feature 21^22: note = phosphorothioate linkage
  misc_feature 22^23: note = phosphorothioate linkage
ttcaggattaatctcatcaaaca

SEQ ID NO: 500 - RNA, 23 nt, synthetic construct
  source 1..23: mol_type = other RNA
  misc_feature 1..23: note = Antisense: ETXS908; corresponding to SEQ ID NO: 140
  modified_base 1: mod_base = OTHER; note = 2'O-methyl-adenosine
  modified_base 2: mod_base = OTHER; note = 2'Fluoro-adenosine
  modified_base 3: mod_base = um
  modified_base 4: mod_base = OTHER; note = 2' Fluoro-cytidine
  modified_base 5: mod_base = cm
  modified_base 6: mod_base = OTHER; note = 2' Fluoro-uridine
  modified_base 7: mod_base = um
  modified_base 8: mod_base = OTHER; note = 2' Fluoro-guanosine
  modified_base 9: mod_base = OTHER; note = 2' Fluoro-uridine
  modified_base 10: mod_base = gm
  modified_base 11: mod_base = gm
  modified_base 12: mod_base = OTHER; note = 2'O-methyl-adenosine
  modified_base 13: mod_base = um
  modified_base 14: mod_base = OTHER; note = 2' Fluoro-guanosine
  modified_base 15: mod_base = OTHER; note = 2'O-methyl-adenosine
  modified_base 16: mod_base = OTHER; note = 2'Fluoro-adenosine
  modified_base 17: mod_base = gm
  modified_base 18: mod_base = gm
  modified_base 19: mod_base = cm
  modified_base 20: mod_base = OTHER; note = 2'O-methyl-adenosine
  modified_base 21: mod_base = OTHER; note = 2'O-methyl-adenosine
  modified_base 22: mod_base = OTHER; note = 2'O-methyl-adenosine
  modified_base 23: mod_base = OTHER; note = 2'O-methyl-adenosine
  misc_feature 1^2: note = phosphorothioate linkage
  misc_feature 2^3: note = phosphorothioate linkage
  misc_feature 21^22: note = phosphorothioate linkage
  misc_feature 22^23: note = phosphorothioate linkage
aatccttgtggatgaaggcaaaa

SEQ ID NO: 501 - RNA, 23 nt, synthetic construct
  source 1..23: mol_type = other RNA
  misc_feature 1..23: note = Antisense: ETXS910; corresponding to SEQ ID NO: 141
  modified_base 1: mod_base = cm
  modified_base 2: mod_base = OTHER; note = 2' Fluoro-cytidine
  modified_base 3: mod_base = OTHER; note = 2'O-methyl-adenosine
  modified_base 4: mod_base = OTHER; note = 2' Fluoro-uridine
  modified_base 5: mod_base = cm
  modified_base 6: mod_base = OTHER; note = 2' Fluoro-guanosine
  modified_base 7: mod_base = um
  modified_base 8: mod_base = OTHER; note = 2' Fluoro-guanosine
  modified_base 9: mod_base = OTHER; note = 2' Fluoro-cytidine
  modified_base 10: mod_base = cm
  modified_base 11: mod_base = um
  modified_base 12: mod_base = cm
  modified_base 13: mod_base = OTHER; note = 2'O-methyl-adenosine
  modified_base 14: mod_base = OTHER; note = 2' Fluoro-uridine
  modified_base 15: mod_base = gm
  modified_base 16: mod_base = OTHER; note = 2' Fluoro-guanosine
  modified_base 17: mod_base = OTHER; note = 2'O-methyl-adenosine
  modified_base 18: mod_base = gm
  modified_base 19: mod_base = OTHER; note = 2'O-methyl-adenosine
  modified_base 20: mod_base = um
  modified_base 21: mod_base = cm
  modified_base 22: mod_base = um
  modified_base 23: mod_base = um
  misc_feature 1^2: note = phosphorothioate linkage
  misc_feature 2^3: note = phosphorothioate linkage
  misc_feature 21^22: note = phosphorothioate linkage
  misc_feature 22^23: note = phosphorothioate linkage
ccatcgtgcctcatggagatctt

SEQ ID NO: 502 - RNA, 23 nt, synthetic construct
  source 1..23: mol_type = other RNA
  misc_feature 1..23: note = Antisense: ETXS912; corresponding to SEQ ID NO: 122
  modified_base 1: mod_base = OTHER; note = 2'O-methyl-adenosine
  modified_base 2: mod_base = OTHER; note = 2'Fluoro-adenosine
  modified_base 3: mod_base = OTHER; note = 2'O-methyl-adenosine
  modified_base 4: mod_base = OTHER; note = 2' Fluoro-uridine
  modified_base 5: mod_base = cm
  modified_base 6: mod_base = OTHER; note = 2' Fluoro-cytidine
  modified_base 7: mod_base = um
  modified_base 8: mod_base = OTHER; note = 2' Fluoro-uridine
  modified_base 9: mod_base = OTHER; note = 2' Fluoro-guanosine
  modified_base 10: mod_base = um
  modified_base 11: mod_base = gm
  modified_base 12: mod_base = gm
  modified_base 13: mod_base = OTHER; note = 2'O-methyl-adenosine
  modified_base 14: mod_base = OTHER; note = 2' Fluoro-uridine
  modified_base 15: mod_base = gm
  modified_base 16: mod_base = OTHER; note = 2'Fluoro-adenosine
  modified_base 17: mod_base = OTHER; note = 2'O-methyl-adenosine
  modified_base 18: mod_base = gm
  modified_base 19: mod_base = gm
  modified_base 20: mod_base = cm
  modified_base 21: mod_base = OTHER; note = 2'O-methyl-adenosine
  modified_base 22: mod_base = OTHER; note = 2'O-methyl-adenosine
  modified_base 23: mod_base = OTHER; note = 2'O-methyl-adenosine
  misc_feature 1^2: note = phosphorothioate linkage
  misc_feature 2^3: note = phosphorothioate linkage
  misc_feature 21^22: note = phosphorothioate linkage
  misc_feature 22^23: note = phosphorothioate linkage
aaatccttgtggatgaaggcaaa

SEQ ID NO: 503 - RNA, 23 nt, synthetic construct
  source 1..23: mol_type = other RNA
  misc_feature 1..23: note = Antisense: ETXS914; corresponding to SEQ ID NO: 123
  modified_base 1: mod_base = gm
  modified_base 2: mod_base = OTHER; note = 2' Fluoro-cytidine
  modified_base 3: mod_base = cm
  modified_base 4: mod_base = OTHER; note = 2' Fluoro-uridine
  modified_base 5: mod_base = cm
  modified_base 6: mod_base = OTHER; note = 2'Fluoro-adenosine
  modified_base 7: mod_base = um
  modified_base 8: mod_base = OTHER; note = 2' Fluoro-guanosine
  modified_base 9: mod_base = OTHER; note = 2' Fluoro-guanosine
  modified_base 10: mod_base = OTHER; note = 2'O-methyl-adenosine
  modified_base 11: mod_base = gm
  modified_base 12: mod_base = OTHER; note = 2'O-methyl-adenosine
  modified_base 13: mod_base = um
  modified_base 14: mod_base = OTHER; note = 2' Fluoro-cytidine
  modified_base 15: mod_base = um
  modified_base 16: mod_base = OTHER; note = 2' Fluoro-uridine
  modified_base 17: mod_base = um
  modified_base 18: mod_base = cm
  modified_base 19: mod_base = gm
  modified_base 20: mod_base = cm
  modified_base 21: mod_base = OTHER; note = 2'O-methyl-adenosine
  modified_base 22: mod_base = gm
  modified_base 23: mod_base = cm
  misc_feature 1^2: note = phosphorothioate linkage
  misc_feature 2^3: note = phosphorothioate linkage
  misc_feature 21^22: note = phosphorothioate linkage
  misc_feature 22^23: note = phosphorothioate linkage
gcctcatggagatctttcgcagc

SEQ ID NO: 504 - RNA, 23 nt, synthetic construct
  source 1..23: mol_type = other RNA
  misc_feature 1..23: note = Antisense: ETXS916; corresponding to SEQ ID NO: 124
  modified_base 1: mod_base = um
  modified_base 2: mod_base = OTHER; note = 2' Fluoro-uridine
  modified_base 3: mod_base = cm
  modified_base 4: mod_base = OTHER; note = 2' Fluoro-uridine
  modified_base 5: mod_base = cm
  modified_base 6: mod_base = OTHER; note = 2' Fluoro-cytidine
  modified_base 7: mod_base = OTHER; note = 2'O-methyl-adenosine
  modified_base 8: mod_base = OTHER; note = 2' Fluoro-uridine
  modified_base 9: mod_base = OTHER; note = 2' Fluoro-guanosine
  modified_base 10: mod_base = OTHER; note = 2'O-methyl-adenosine
  modified_base 11: mod_base = gm
  modified_base 12: mod_base = gm
  modified_base 13: mod_base = OTHER; note = 2'O-methyl-adenosine
  modified_base 14: mod_base = OTHER; note = 2' Fluoro-cytidine
  modified_base 15: mod_base = cm
  modified_base 16: mod_base = OTHER; note = 2'Fluoro-adenosine
  modified_base 17: mod_base = cm
  modified_base 18: mod_base = cm
  modified_base 19: mod_base = OTHER; note = 2'O-methyl-adenosine
  modified_base 20: mod_base = gm
  modified_base 21: mod_base = cm
  modified_base 22: mod_base = OTHER; note = 2'O-methyl-adenosine
  modified_base 23: mod_base = um
  misc_feature 1^2: note = phosphorothioate linkage
  misc_feature 2^3: note = phosphorothioate linkage
  misc_feature 21^22: note = phosphorothioate linkage
  misc_feature 22^23: note = phosphorothioate linkage
ttctccatgaggaccaccagcat

SEQ ID NO: 505 - RNA, 23 nt, synthetic construct
  source 1..23: mol_type = other RNA
  misc_feature 1..23: note = Antisense: ETXS918; corresponding to SEQ ID NO: 125
  modified_base 1: mod_base = um
  modified_base 2: mod_base = OTHER; note = 2' Fluoro-guanosine
  modified_base 3: mod_base = cm
  modified_base 4: mod_base = OTHER; note = 2' Fluoro-cytidine
  modified_base 5: mod_base = um
  modified_base 6: mod_base = OTHER; note = 2' Fluoro-cytidine
  modified_base 7: mod_base = OTHER; note = 2'O-methyl-adenosine
  modified_base 8: mod_base = OTHER; note = 2' Fluoro-uridine
  modified_base 9: mod_base = OTHER; note = 2' Fluoro-guanosine
  modified_base 10: mod_base = gm
  modified_base 11: mod_base = OTHER; note = 2'O-methyl-adenosine
  modified_base 12: mod_base = gm
  modified_base 13: mod_base = OTHER; note = 2'O-methyl-adenosine
  modified_base 14: mod_base = OTHER; note = 2' Fluoro-uridine
  modified_base 15: mod_base = cm
  modified_base 16: mod_base = OTHER; note = 2' Fluoro-uridine
  modified_base 17: mod_base = um
  modified_base 18: mod_base = um
  modified_base 19: mod_base = cm
  modified_base 20: mod_base = gm
  modified_base 21: mod_base = cm
  modified_base 22: mod_base = OTHER; note = 2'O-methyl-adenosine
  modified_base 23: mod_base = gm
  misc_feature 1^2: note = phosphorothioate linkage
  misc_feature 2^3: note = phosphorothioate linkage
  misc_feature 21^22: note = phosphorothioate linkage
  misc_feature 22^23: note = phosphorothioate linkage
tgcctcatggagatctttcgcag

SEQ ID NO: 506 - RNA, 23 nt, synthetic construct
  source 1..23: mol_type = other RNA
  misc_feature 1..23: note = Antisense: ETXS920; corresponding to SEQ ID NO: 126
  modified_base 1: mod_base = OTHER; note = 2'O-methyl-adenosine
  modified_base 2: mod_base = OTHER; note = 2' Fluoro-guanosine
  modified_base 3: mod_base = cm
  modified_base 4: mod_base = OTHER; note = 2'Fluoro-adenosine
  modified_base 5: mod_base = gm
  modified_base 6: mod_base = OTHER; note = 2' Fluoro-cytidine
  modified_base 7: mod_base = um
  modified_base 8: mod_base = OTHER; note = 2' Fluoro-cytidine
  modified_base 9: mod_base = OTHER; note = 2'Fluoro-adenosine
  modified_base 10: mod_base = um
  modified_base 11: mod_base = gm
  modified_base 12: mod_base = cm
  modified_base 13: mod_base = OTHER; note = 2'O-methyl-adenosine
  modified_base 14: mod_base = OTHER; note = 2' Fluoro-uridine
  modified_base 15: mod_base = cm
  modified_base 16: mod_base = OTHER; note = 2' Fluoro-uridine
  modified_base 17: mod_base = cm
  modified_base 18: mod_base = OTHER; note = 2'O-methyl-adenosine
  modified_base 19: mod_base = um
  modified_base 20: mod_base = OTHER; note = 2'O-methyl-adenosine
  modified_base 21: mod_base = cm
  modified_base 22: mod_base = um
  modified_base 23: mod_base = um
  misc_feature 1^2: note = phosphorothioate linkage
  misc_feature 2^3: note = phosphorothioate linkage
  misc_feature 21^22: note = phosphorothioate linkage
  misc_feature 22^23: note = phosphorothioate linkage
agcagctcatgcatctcatactt

SEQ ID NO: 507 - RNA, 23 nt, synthetic construct
  source 1..23: mol_type = other RNA
  misc_feature 1..23: note = Antisense: ETXS922; corresponding to SEQ ID NO: 127
  modified_base 1: mod_base = um
  modified_base 2: mod_base = OTHER; note = 2' Fluoro-cytidine
  modified_base 3: mod_base = OTHER; note = 2'O-methyl-adenosine
  modified_base 4: mod_base = OTHER; note = 2' Fluoro-guanosine
  modified_base 5: mod_base = gm
  modified_base 6: mod_base = OTHER; note = 2'Fluoro-adenosine
  modified_base 7: mod_base = um
  modified_base 8: mod_base = OTHER; note = 2' Fluoro-uridine
  modified_base 9: mod_base = OTHER; note = 2'Fluoro-adenosine
  modified_base 10: mod_base = OTHER; note = 2'O-methyl-adenosine
  modified_base 11: mod_base = um
  modified_base 12: mod_base = cm
  modified_base 13: mod_base = um
  modified_base 14: mod_base = OTHER; note = 2' Fluoro-cytidine
  modified_base 15: mod_base = OTHER; note = 2'O-methyl-adenosine
  modified_base 16: mod_base = OTHER; note = 2' Fluoro-uridine
  modified_base 17: mod_base = cm
  modified_base 18: mod_base = OTHER; note = 2'O-methyl-adenosine
  modified_base 19: mod_base = OTHER; note = 2'O-methyl-adenosine
  modified_base 20: mod_base = OTHER; note = 2'O-methyl-adenosine
  modified_base 21: mod_base = cm
  modified_base 22: mod_base = OTHER; note = 2'O-methyl-adenosine
  modified_base 23: mod_base = gm
  misc_feature 1^2: note = phosphorothioate linkage
  misc_feature 2^3: note = phosphorothioate linkage
  misc_feature 21^22: note = phosphorothioate linkage
  misc_feature 22^23: note = phosphorothioate linkage
tcaggattaatctcatcaaacag

SEQ ID NO: 508 - RNA, 23 nt, synthetic construct
  source 1..23: mol_type = other RNA
  misc_feature 1..23: note = Antisense: ETXS924; corresponding to SEQ ID NO: 128
  modified_base 1: mod_base = um
  modified_base 2: mod_base = OTHER; note = 2' Fluoro-uridine
  modified_base 3: mod_base = gm
  modified_base 4: mod_base = OTHER; note = 2' Fluoro-guanosine
  modified_base 5: mod_base = um
  modified_base 6: mod_base = OTHER; note = 2' Fluoro-uridine
  modified_base 7: mod_base = um
  modified_base 8: mod_base = OTHER; note = 2' Fluoro-cytidine
  modified_base 9: mod_base = OTHER; note = 2'Fluoro-adenosine
  modified_base 10: mod_base = gm
  modified_base 11: mod_base = gm
  modified_base 12: mod_base = OTHER; note = 2'O-methyl-adenosine
  modified_base 13: mod_base = um
  modified_base 14: mod_base = OTHER; note = 2' Fluoro-uridine
  modified_base 15: mod_base = OTHER; note = 2'O-methyl-adenosine
  modified_base 16: mod_base = OTHER; note = 2'Fluoro-adenosine
  modified_base 17: mod_base = um
  modified_base 18: mod_base = cm
  modified_base 19: mod_base = um
  modified_base 20: mod_base = cm
  modified_base 21: mod_base = OTHER; note = 2'O-methyl-adenosine
  modified_base 22: mod_base = um
  modified_base 23: mod_base = cm
  misc_feature 1^2: note = phosphorothioate linkage
  misc_feature 2^3: note = phosphorothioate linkage
  misc_feature 21^22: note = phosphorothioate linkage
  misc_feature 22^23: note = phosphorothioate linkage
ttggtttcaggattaatctcatc

SEQ ID NO: 509 - RNA, 23 nt, synthetic construct
  source 1..23: mol_type = other RNA
  misc_feature 1..23: note = Antisense: ETXS926; corresponding to SEQ ID NO: 129
  modified_base 1: mod_base = gm
  modified_base 2: mod_base = OTHER; note = 2' Fluoro-uridine
  modified_base 3: mod_base = um
  modified_base 4: mod_base = OTHER; note = 2' Fluoro-uridine
  modified_base 5: mod_base = cm
  modified_base 6: mod_base = OTHER; note = 2'Fluoro-adenosine
  modified_base 7: mod_base = gm
  modified_base 8: mod_base = OTHER; note = 2' Fluoro-guanosine
  modified_base 9: mod_base = OTHER; note = 2'Fluoro-adenosine
  modified_base 10: mod_base = um
  modified_base 11: mod_base = um
  modified_base 12: mod_base = OTHER; note = 2'O-methyl-adenosine
  modified_base 13: mod_base = OTHER; note = 2'O-methyl-adenosine
  modified_base 14: mod_base = OTHER; note = 2' Fluoro-uridine
  modified_base 15: mod_base = cm
  modified_base 16: mod_base = OTHER; note = 2' Fluoro-uridine
  modified_base 17: mod_base = cm
  modified_base 18: mod_base = OTHER; note = 2'O-methyl-adenosine
  modified_base 19: mod_base = um
  modified_base 20: mod_base = cm
  modified_base 21: mod_base = OTHER; note = 2'O-methyl-adenosine
  modified_base 22: mod_base = OTHER; note = 2'O-methyl-adenosine
  modified_base 23: mod_base = OTHER; note = 2'O-methyl-adenosine
  misc_feature 1^2: note = phosphorothioate linkage
  misc_feature 2^3: note = phosphorothioate linkage
  misc_feature 21^22: note = phosphorothioate linkage
  misc_feature 22^23: note = phosphorothioate linkage
gtttcaggattaatctcatcaaa

SEQ ID NO: 510 - RNA, 23 nt, synthetic construct
  source 1..23: mol_type = other RNA
  misc_feature 1..23: note = Antisense: ETXS928; corresponding to SEQ ID NO: 130
  modified_base 1: mod_base = um
  modified_base 2: mod_base = OTHER; note = 2' Fluoro-guanosine
  modified_base 3: mod_base = gm
  modified_base 4: mod_base = OTHER; note = 2' Fluoro-uridine
  modified_base 5: mod_base = um
  modified_base 6: mod_base = OTHER; note = 2' Fluoro-uridine
  modified_base 7: mod_base = cm
  modified_base 8: mod_base = OTHER; note = 2'Fluoro-adenosine
  modified_base 9: mod_base = OTHER; note = 2' Fluoro-guanosine
  modified_base 10: mod_base = gm
  modified_base 11: mod_base = OTHER; note = 2'O-methyl-adenosine
  modified_base 12: mod_base = um
  modified_base 13: mod_base = um
  modified_base 14: mod_base = OTHER; note = 2'Fluoro-adenosine
  modified_base 15: mod_base = OTHER; note = 2'O-methyl-adenosine
  modified_base 16: mod_base = OTHER; note = 2' Fluoro-uridine
  modified_base 17: mod_base = cm
  modified_base 18: mod_base = um
  modified_base 19: mod_base = cm
  modified_base 20: mod_base = OTHER; note = 2'O-methyl-adenosine
  modified_base 21: mod_base = um
  modified_base 22: mod_base = cm
  modified_base 23: mod_base = OTHER; note = 2'O-methyl-adenosine
  misc_feature 1^2: note = phosphorothioate linkage
  misc_feature 2^3: note = phosphorothioate linkage
  misc_feature 21^22: note = phosphorothioate linkage
  misc_feature 22^23: note = phosphorothioate linkage
tggtttcaggattaatctcatca

SEQ ID NO: 511 - RNA, 23 nt, synthetic construct
  source 1..23: mol_type = other RNA
  misc_feature 1..23: note = Antisense: ETXS930; corresponding to SEQ ID NO: 131
  modified_base 1: mod_base = gm
  modified_base 2: mod_base = OTHER; note = 2' Fluoro-guanosine
  modified_base 3: mod_base = um
  modified_base 4: mod_base = OTHER; note = 2' Fluoro-uridine
  modified_base 5: mod_base = um
  modified_base 6: mod_base = OTHER; note = 2' Fluoro-cytidine
  modified_base 7: mod_base = OTHER; note = 2'O-methyl-adenosine
  modified_base 8: mod_base = OTHER; note = 2' Fluoro-guanosine
  modified_base 9: mod_base = OTHER; note = 2' Fluoro-guanosine
  modified_base 10: mod_base = OTHER; note = 2'O-methyl-adenosine
  modified_base 11: mod_base = um
  modified_base 12: mod_base = um
  modified_base 13: mod_base = OTHER; note = 2'O-methyl-adenosine
  modified_base 14: mod_base = OTHER; note = 2'Fluoro-adenosine
  modified_base 15: mod_base = um
  modified_base 16: mod_base = OTHER; note = 2' Fluoro-cytidine
  modified_base 17: mod_base = um
  modified_base 18: mod_base = cm
  modified_base 19: mod_base = OTHER; note = 2'O-methyl-adenosine
  modified_base 20: mod_base = um
  modified_base 21: mod_base = cm
  modified_base 22: mod_base = OTHER; note = 2'O-methyl-adenosine
  modified_base 23: mod_base = OTHER; note = 2'O-methyl-adenosine
  misc_feature 1^2: note = phosphorothioate linkage
  misc_feature 2^3: note = phosphorothioate linkage
  misc_feature 21^22: note = phosphorothioate linkage
  misc_feature 22^23: note = phosphorothioate linkage
ggtttcaggattaatctcatcaa

SEQ ID NO: 512 - RNA, 23 nt, synthetic construct
  source 1..23: mol_type = other RNA
  misc_feature 1..23: note = Antisense: ETXS932; corresponding to SEQ ID NO: 132
  modified_base 1: mod_base = OTHER; note = 2'O-methyl-adenosine
  modified_base 2: mod_base = OTHER; note = 2' Fluoro-guanosine
  modified_base 3: mod_base = gm
  modified_base 4: mod_base = OTHER; note = 2'Fluoro-adenosine
  modified_base 5: mod_base = um
  modified_base 6: mod_base = OTHER; note = 2' Fluoro-uridine
  modified_base 7: mod_base = OTHER; note = 2'O-methyl-adenosine
  modified_base 8: mod_base = OTHER; note = 2'Fluoro-adenosine
  modified_base 9: mod_base = OTHER; note = 2' Fluoro-uridine
  modified_base 10: mod_base = cm
  modified_base 11: mod_base = um
  modified_base 12: mod_base = cm
  modified_base 13: mod_base = OTHER; note = 2'O-methyl-adenosine
  modified_base 14: mod_base = OTHER; note = 2' Fluoro-uridine
  modified_base 15: mod_base = cm
  modified_base 16: mod_base = OTHER; note = 2'Fluoro-adenosine
  modified_base 17: mod_base = OTHER; note = 2'O-methyl-adenosine
  modified_base 18: mod_base = OTHER; note = 2'O-methyl-adenosine
  modified_base 19: mod_base = cm
  modified_base 20: mod_base = OTHER; note = 2'O-methyl-adenosine
  modified_base 21: mod_base = gm
  modified_base 22: mod_base = um
  modified_base 23: mod_base = um
  misc_feature 1^2: note = phosphorothioate linkage
  misc_feature 2^3: note = phosphorothioate linkage
  misc_feature 21^22: note = phosphorothioate linkage
  misc_feature 22^23: note = phosphorothioate linkage
aggattaatctcatcaaacagtt

SEQ ID NO: 513 - RNA, 23 nt, synthetic construct
  source 1..23: mol_type = other RNA
  misc_feature 1..23: note = Antisense: ETXS934; corresponding to SEQ ID NO: 133
  modified_base 1: mod_base = um
  modified_base 2: mod_base = OTHER; note = 2' Fluoro-cytidine
  modified_base 3: mod_base = cm
  modified_base 4: mod_base = OTHER; note = 2' Fluoro-uridine
  modified_base 5: mod_base = um
  modified_base 6: mod_base = OTHER; note = 2' Fluoro-guanosine
  modified_base 7: mod_base = um
  modified_base 8: mod_base = OTHER; note = 2' Fluoro-guanosine
  modified_base 9: mod_base = OTHER; note = 2' Fluoro-guanosine
  modified_base 10: mod_base = OTHER; note = 2'O-methyl-adenosine
  modified_base 11: mod_base = um
  modified_base 12: mod_base = gm
  modified_base 13: mod_base = OTHER; note = 2'O-methyl-adenosine
  modified_base 14: mod_base = OTHER; note = 2'Fluoro-adenosine
  modified_base 15: mod_base = gm
  modified_base 16: mod_base = OTHER; note = 2' Fluoro-guanosine
  modified_base 17: mod_base = cm
  modified_base 18: mod_base = OTHER; note = 2'O-methyl-adenosine
  modified_base 19: mod_base = OTHER; note = 2'O-methyl-adenosine
  modified_base 20: mod_base = OTHER; note = 2'O-methyl-adenosine
  modified_base 21: mod_base = OTHER; note = 2'O-methyl-adenosine
  modified_base 22: mod_base = cm
  modified_base 23: mod_base = um
  misc_feature 1^2: note = phosphorothioate linkage
  misc_feature 2^3: note = phosphorothioate linkage
  misc_feature 21^22: note = phosphorothioate linkage
  misc_feature 22^23: note = phosphorothioate linkage
tccttgtggatgaaggcaaaact

SEQ ID NO: 514 - RNA, 23 nt, synthetic construct
  source 1..23: mol_type = other RNA
  misc_feature 1..23: note = Antisense: ETXS936; corresponding to SEQ ID NO: 134
  modified_base 1: mod_base = gm
  modified_base 2: mod_base = OTHER; note = 2' Fluoro-uridine
  modified_base 3: mod_base = gm
  modified_base 4: mod_base = OTHER; note = 2' Fluoro-cytidine
  modified_base 5: mod_base = cm
  modified_base 6: mod_base = OTHER; note = 2' Fluoro-uridine
  modified_base 7: mod_base = cm
  modified_base 8: mod_base = OTHER; note = 2'Fluoro-adenosine
  modified_base 9: mod_base = OTHER; note = 2' Fluoro-uridine
  modified_base 10: mod_base = gm
  modified_base 11: mod_base = gm
  modified_base 12: mod_base = OTHER; note = 2'O-methyl-adenosine
  modified_base 13: mod_base = gm
  modified_base 14: mod_base = OTHER; note = 2'Fluoro-adenosine
  modified_base 15: mod_base = um
  modified_base 16: mod_base = OTHER; note = 2' Fluoro-cytidine
  modified_base 17: mod_base = um
  modified_base 18: mod_base = um
  modified_base 19: mod_base = um
  modified_base 20: mod_base = cm
  modified_base 21: mod_base = gm
  modified_base 22: mod_base = cm
  modified_base 23: mod_base = OTHER; note = 2'O-methyl-adenosine
  misc_feature 1^2: note = phosphorothioate linkage
  misc_feature 2^3: note = phosphorothioate linkage
  misc_feature 21^22: note = phosphorothioate linkage
  misc_feature 22^23: note = phosphorothioate linkage
gtgcctcatggagatctttcgca

SEQ ID NO: 515 - RNA, 23 nt, synthetic construct
  source 1..23: mol_type = other RNA
  misc_feature 1..23: note = Antisense: ETXS938; corresponding to SEQ ID NO: 135
  modified_base 1: mod_base = um
  modified_base 2: mod_base = OTHER; note = 2' Fluoro-cytidine
  modified_base 3: mod_base = um
  modified_base 4: mod_base = OTHER; note = 2' Fluoro-cytidine
  modified_base 5: mod_base = cm
  modified_base 6: mod_base = OTHER; note = 2'Fluoro-adenosine
  modified_base 7: mod_base = um
  modified_base 8: mod_base = OTHER; note = 2' Fluoro-guanosine
  modified_base 9: mod_base = OTHER; note = 2'Fluoro-adenosine
  modified_base 10: mod_base = gm
  modified_base 11: mod_base = gm
  modified_base 12: mod_base = OTHER; note = 2'O-methyl-adenosine
  modified_base 13: mod_base = cm
  modified_base 14: mod_base = OTHER; note = 2' Fluoro-cytidine
  modified_base 15: mod_base = OTHER; note = 2'O-methyl-adenosine
  modified_base 16: mod_base = OTHER; note = 2' Fluoro-cytidine
  modified_base 17: mod_base = cm
  modified_base 18: mod_base = OTHER; note = 2'O-methyl-adenosine
  modified_base 19: mod_base = gm
  modified_base 20: mod_base = cm
  modified_base 21: mod_base = OTHER; note = 2'O-methyl-adenosine
  modified_base 22: mod_base = um
  modified_base 23: mod_base = gm
  misc_feature 1^2: note = phosphorothioate linkage
  misc_feature 2^3: note = phosphorothioate linkage
  misc_feature 21^22: note = phosphorothioate linkage
  misc_feature 22^23: note = phosphorothioate linkage
tctccatgaggaccaccagcatg

SEQ ID NO: 516 - RNA, 23 nt, synthetic construct
  source 1..23: mol_type = other RNA
  misc_feature 1..23: note = Antisense: ETXS940; corresponding to SEQ ID NO: 136
  modified_base 1: mod_base = cm
  modified_base 2: mod_base = OTHER; note = 2'Fluoro-adenosine
  modified_base 3: mod_base = OTHER; note = 2'O-methyl-adenosine
  modified_base 4: mod_base = OTHER; note = 2'Fluoro-adenosine
  modified_base 5: mod_base = OTHER; note = 2'O-methyl-adenosine
  modified_base 6: mod_base = OTHER; note = 2' Fluoro-uridine
  modified_base 7: mod_base = cm
  modified_base 8: mod_base = OTHER; note = 2' Fluoro-cytidine
  modified_base 9: mod_base = OTHER; note = 2' Fluoro-uridine
  modified_base 10: mod_base = um
  modified_base 11: mod_base = gm
  modified_base 12: mod_base = um
  modified_base 13: mod_base = gm
  modified_base 14: mod_base = OTHER; note = 2' Fluoro-guanosine
  modified_base 15: mod_base = OTHER; note = 2'O-methyl-adenosine
  modified_base 16: mod_base = OTHER; note = 2' Fluoro-uridine
  modified_base 17: mod_base = gm
  modified_base 18: mod_base = OTHER; note = 2'O-methyl-adenosine
  modified_base 19: mod_base = OTHER; note = 2'O-methyl-adenosine
  modified_base 20: mod_base = gm
  modified_base 21: mod_base = gm
  modified_base 22: mod_base = cm
  modified_base 23: mod_base = OTHER; note = 2'O-methyl-adenosine
  misc_feature 1^2: note = phosphorothioate linkage
  misc_feature 2^3: note = phosphorothioate linkage
  misc_feature 21^22: note = phosphorothioate linkage
  misc_feature 22^23: note = phosphorothioate linkage
caaaatccttgtggatgaaggca

SEQ ID NO: 517 - RNA, 23 nt, synthetic construct
  source 1..23: mol_type = other RNA
  misc_feature 1..23: note = Antisense: ETXS942; corresponding to SEQ ID NO: 137
  modified_base 1: mod_base = cm
  modified_base 2: mod_base = OTHER; note = 2' Fluoro-guanosine
  modified_base 3: mod_base = um
  modified_base 4: mod_base = OTHER; note = 2' Fluoro-guanosine
  modified_base 5: mod_base = cm
  modified_base 6: mod_base = OTHER; note = 2' Fluoro-cytidine
  modified_base 7: mod_base = um
  modified_base 8: mod_base = OTHER; note = 2' Fluoro-cytidine
  modified_base 9: mod_base = OTHER; note = 2'Fluoro-adenosine
  modified_base 10: mod_base = um
  modified_base 11: mod_base = gm
  modified_base 12: mod_base = gm
  modified_base 13: mod_base = OTHER; note = 2'O-methyl-adenosine
  modified_base 14: mod_base = OTHER; note = 2' Fluoro-guanosine
  modified_base 15: mod_base = OTHER; note = 2'O-methyl-adenosine
  modified_base 16: mod_base = OTHER; note = 2' Fluoro-uridine
  modified_base 17: mod_base = cm
  modified_base 18: mod_base = um
  modified_base 19: mod_base = um
  modified_base 20: mod_base = um
  modified_base 21: mod_base = cm
  modified_base 22: mod_base = gm
  modified_base 23: mod_base = cm
  misc_feature 1^2: note = phosphorothioate linkage
  misc_feature 2^3: note = phosphorothioate linkage
  misc_feature 21^22: note = phosphorothioate linkage
  misc_feature 22^23: note = phosphorothioate linkage
cgtgcctcatggagatctttcgc

SEQ ID NO: 518 - RNA, 23 nt, synthetic construct
  source 1..23: mol_type = other RNA
  misc_feature 1..23: note = Antisense: ETXS944; corresponding to SEQ ID NO: 138
  modified_base 1: mod_base = OTHER; note = 2'O-methyl-adenosine
  modified_base 2: mod_base = OTHER; note = 2' Fluoro-uridine
  modified_base 3: mod_base = cm
  modified_base 4: mod_base = OTHER; note = 2'Fluoro-adenosine
  modified_base 5: mod_base = OTHER; note = 2'O-methyl-adenosine
  modified_base 6: mod_base = OTHER; note = 2'Fluoro-adenosine
  modified_base 7: mod_base = OTHER; note = 2'O-methyl-adenosine
  modified_base 8: mod_base = OTHER; note = 2' Fluoro-uridine
  modified_base 9: mod_base = OTHER; note = 2' Fluoro-cytidine
  modified_base 10: mod_base = cm
  modified_base 11: mod_base = um
  modified_base 12: mod_base = um
  modified_base 13: mod_base = gm
  modified_base 14: mod_base = OTHER; note = 2' Fluoro-uridine
  modified_base 15: mod_base = gm
  modified_base 16: mod_base = OTHER; note = 2' Fluoro-guanosine
  modified_base 17: mod_base = OTHER; note = 2'O-methyl-adenosine
  modified_base 18: mod_base = um
  modified_base 19: mod_base = gm
  modified_base 20: mod_base = OTHER; note = 2'O-methyl-adenosine
  modified_base 21: mod_base = OTHER; note = 2'O-methyl-adenosine
  modified_base 22: mod_base = gm
  modified_base 23: mod_base = gm
  misc_feature 1^2: note = phosphorothioate linkage
  misc_feature 2^3: note = phosphorothioate linkage
  misc_feature 21^22: note = phosphorothioate linkage
  misc_feature 22^23: note = phosphorothioate linkage
atcaaaatccttgtggatgaagg

SEQ ID NO: 519 - RNA, 23 nt, synthetic construct
  source 1..23: mol_type = other RNA
  misc_feature 1..23: note = Antisense: ETXS946; corresponding to SEQ ID NO: 139
  modified_base 1: mod_base = um
  modified_base 2: mod_base = OTHER; note = 2' Fluoro-uridine
  modified_base 3: mod_base = cm
  modified_base 4: mod_base = OTHER; note = 2'Fluoro-adenosine
  modified_base 5: mod_base = gm
  modified_base 6: mod_base = OTHER; note = 2' Fluoro-guanosine
  modified_base 7: mod_base = OTHER; note = 2'O-methyl-adenosine
  modified_base 8: mod_base = OTHER; note = 2' Fluoro-uridine
  modified_base 9: mod_base = OTHER; note = 2' Fluoro-uridine
  modified_base 10: mod_base = OTHER; note = 2'O-methyl-adenosine
  modified_base 11: mod_base = OTHER; note = 2'O-methyl-adenosine
  modified_base 12: mod_base = um
  modified_base 13: mod_base = cm
  modified_base 14: mod_base = OTHER; note = 2' Fluoro-uridine
  modified_base 15: mod_base = cm
  modified_base 16: mod_base = OTHER; note = 2'Fluoro-adenosine
  modified_base 17: mod_base = um
  modified_base 18: mod_base = cm
  modified_base 19: mod_base = OTHER; note = 2'O-methyl-adenosine
  modified_base 20: mod_base = OTHER; note = 2'O-methyl-adenosine
  modified_base 21: mod_base = OTHER; note = 2'O-methyl-adenosine
  modified_base 22: mod_base = cm
  modified_base 23: mod_base = OTHER; note = 2'O-methyl-adenosine
  misc_feature 1^2: note = phosphorothioate linkage
  misc_feature 2^3: note = phosphorothioate linkage
  misc_feature 21^22: note = phosphorothioate linkage
  misc_feature 22^23: note = phosphorothioate linkage
ttcaggattaatctcatcaaaca

SEQ ID NO: 520 - RNA, 23 nt, synthetic construct
  source 1..23: mol_type = other RNA
  misc_feature 1..23: note = Antisense: ETXS948; corresponding to SEQ ID NO: 140
  modified_base 1: mod_base = OTHER; note = 2'O-methyl-adenosine
  modified_base 2: mod_base = OTHER; note = 2'Fluoro-adenosine
  modified_base 3: mod_base = um
  modified_base 4: mod_base = OTHER; note = 2' Fluoro-cytidine
  modified_base 5: mod_base = cm
  modified_base 6: mod_base = OTHER; note = 2' Fluoro-uridine
  modified_base 7: mod_base = um
  modified_base 8: mod_base = OTHER; note = 2' Fluoro-guanosine
  modified_base 9: mod_base = OTHER; note = 2' Fluoro-uridine
  modified_base 10: mod_base = gm
  modified_base 11: mod_base = gm
  modified_base 12: mod_base = OTHER; note = 2'O-methyl-adenosine
  modified_base 13: mod_base = um
  modified_base 14: mod_base = OTHER; note = 2' Fluoro-guanosine
  modified_base 15: mod_base = OTHER; note = 2'O-methyl-adenosine
  modified_base 16: mod_base = OTHER; note = 2'Fluoro-adenosine
  modified_base 17: mod_base = gm
  modified_base 18: mod_base = gm
  modified_base 19: mod_base = cm
  modified_base 20: mod_base = OTHER; note = 2'O-methyl-adenosine
  modified_base 21: mod_base = OTHER; note = 2'O-methyl-adenosine
  modified_base 22: mod_base = OTHER; note = 2'O-methyl-adenosine
  modified_base 23: mod_base = OTHER; note = 2'O-methyl-adenosine
  misc_feature 1^2: note = phosphorothioate linkage
  misc_feature 2^3: note = phosphorothioate linkage
  misc_feature 21^22: note = phosphorothioate linkage
  misc_feature 22^23: note = phosphorothioate linkage
aatccttgtggatgaaggcaaaa

SEQ ID NO: 521 - RNA, 23 nt, synthetic construct
  source 1..23: mol_type = other RNA
  misc_feature 1..23: note = Antisense: ETXS950; corresponding to SEQ ID NO: 141
  modified_base 1: mod_base = cm
  modified_base 2: mod_base = OTHER; note = 2' Fluoro-cytidine
  modified_base 3: mod_base = OTHER; note = 2'O-methyl-adenosine
  modified_base 4: mod_base = OTHER; note = 2' Fluoro-uridine
  modified_base 5: mod_base = cm
  modified_base 6: mod_base = OTHER; note = 2' Fluoro-guanosine
  modified_base 7: mod_base = um
  modified_base 8: mod_base = OTHER; note = 2' Fluoro-guanosine
  modified_base 9: mod_base = OTHER; note = 2' Fluoro-cytidine
  modified_base 10: mod_base = cm
  modified_base 11: mod_base = um
  modified_base 12: mod_base = cm
  modified_base 13: mod_base = OTHER; note = 2'O-methyl-adenosine
  modified_base 14: mod_base = OTHER; note = 2' Fluoro-uridine
  modified_base 15: mod_base = gm
  modified_base 16: mod_base = OTHER; note = 2' Fluoro-guanosine
  modified_base 17: mod_base = OTHER; note = 2'O-methyl-adenosine
  modified_base 18: mod_base = gm
  modified_base 19: mod_base = OTHER; note = 2'O-methyl-adenosine
  modified_base 20: mod_base = um
  modified_base 21: mod_base = cm
  modified_base 22: mod_base = um
  modified_base 23: mod_base = um
  misc_feature 1^2: note = phosphorothioate linkage
  misc_feature 2^3: note = phosphorothioate linkage
  misc_feature 21^22: note = phosphorothioate linkage
  misc_feature 22^23: note = phosphorothioate linkage
ccatcgtgcctcatggagatctt

SEQ ID NO: 522 - RNA, 23 nt, synthetic construct
  source 1..23: mol_type = other RNA
  misc_feature 1..23: note = Antisense: ETXS952; corresponding to SEQ ID NO: 122
  modified_base 1: mod_base = OTHER; note = 2'O-methyl-adenosine
  modified_base 2: mod_base = OTHER; note = 2'Fluoro-adenosine
  modified_base 3: mod_base = OTHER; note = 2'O-methyl-adenosine
  modified_base 4: mod_base = OTHER; note = 2' Fluoro-uridine
  modified_base 5: mod_base = cm
  modified_base 6: mod_base = OTHER; note = 2' Fluoro-cytidine
  modified_base 7: mod_base = um
  modified_base 8: mod_base = OTHER; note = 2' Fluoro-uridine
  modified_base 9: mod_base = OTHER; note = 2' Fluoro-guanosine
  modified_base 10: mod_base = um
  modified_base 11: mod_base = gm
  modified_base 12: mod_base = gm
  modified_base 13: mod_base = OTHER; note = 2'O-methyl-adenosine
  modified_base 14: mod_base = OTHER; note = 2' Fluoro-uridine
  modified_base 15: mod_base = gm
  modified_base 16: mod_base = OTHER; note = 2'Fluoro-adenosine
  modified_base 17: mod_base = OTHER; note = 2'O-methyl-adenosine
  modified_base 18: mod_base = gm
  modified_base 19: mod_base = gm
  modified_base 20: mod_base = cm
  modified_base 21: mod_base = OTHER; note = 2'O-methyl-adenosine
  modified_base 22: mod_base = OTHER; note = 2'O-methyl-adenosine
  modified_base 23: mod_base = OTHER; note = 2'O-methyl-adenosine
  misc_feature 1^2: note = phosphorothioate linkage
  misc_feature 2^3: note = phosphorothioate linkage
  misc_feature 21^22: note = phosphorothioate linkage
  misc_feature 22^23: note = phosphorothioate linkage
aaatccttgtggatgaaggcaaa

SEQ ID NO: 523 - RNA, 23 nt, synthetic construct
  source 1..23: mol_type = other RNA
  misc_feature 1..23: note = Antisense: ETXS954; corresponding to SEQ ID NO: 123
  modified_base 1: mod_base = gm
  modified_base 2: mod_base = OTHER; note = 2' Fluoro-cytidine
  modified_base 3: mod_base = cm
  modified_base 4: mod_base = OTHER; note = 2' Fluoro-uridine
  modified_base 5: mod_base = cm
  modified_base 6: mod_base = OTHER; note = 2'Fluoro-adenosine
  modified_base 7: mod_base = um
  modified_base 8: mod_base = OTHER; note = 2' Fluoro-guanosine
  modified_base 9: mod_base = OTHER; note = 2' Fluoro-guanosine
  modified_base 10: mod_base = OTHER; note = 2'O-methyl-adenosine
  modified_base 11: mod_base = gm
  modified_base 12: mod_base = OTHER; note = 2'O-methyl-adenosine
  modified_base 13: mod_base = um
  modified_base 14: mod_base = OTHER; note = 2' Fluoro-cytidine
  modified_base 15: mod_base = um
  modified_base 16: mod_base = OTHER; note = 2' Fluoro-uridine
  modified_base 17: mod_base = um
  modified_base 18: mod_base = cm
  modified_base 19: mod_base = gm
  modified_base 20: mod_base = cm
  modified_base 21: mod_base = OTHER; note = 2'O-methyl-adenosine
  modified_base 22: mod_base = gm
  modified_base 23: mod_base = cm
  misc_feature 1^2: note = phosphorothioate linkage
  misc_feature 2^3: note = phosphorothioate linkage
  misc_feature 21^22: note = phosphorothioate linkage
  misc_feature 22^23: note = phosphorothioate linkage
gcctcatggagatctttcgcagc

SEQ ID NO: 524 - RNA, 23 nt, synthetic construct
  source 1..23: mol_type = other RNA
  misc_feature 1..23: note = Antisense: ETXS956; corresponding to SEQ ID NO: 124
  modified_base 1: mod_base = um
  modified_base 2: mod_base = OTHER; note = 2' Fluoro-uridine
  modified_base 3: mod_base = cm
  modified_base 4: mod_base = OTHER; note = 2' Fluoro-uridine
  modified_base 5: mod_base = cm
  modified_base 6: mod_base = OTHER; note = 2' Fluoro-cytidine
  modified_base 7: mod_base = OTHER; note = 2'O-methyl-adenosine
  modified_base 8: mod_base = OTHER; note = 2' Fluoro-uridine
  modified_base 9: mod_base = OTHER; note = 2' Fluoro-guanosine
  modified_base 10: mod_base = OTHER; note = 2'O-methyl-adenosine
  modified_base 11: mod_base = gm
  modified_base 12: mod_base = gm
  modified_base 13: mod_base = OTHER; note = 2'O-methyl-adenosine
  modified_base 14: mod_base = OTHER; note = 2' Fluoro-cytidine
  modified_base 15: mod_base = cm
  modified_base 16: mod_base = OTHER; note = 2'Fluoro-adenosine
  modified_base 17: mod_base = cm
  modified_base 18: mod_base = cm
  modified_base 19: mod_base = OTHER; note = 2'O-methyl-adenosine
  modified_base 20: mod_base = gm
  modified_base 21: mod_base = cm
  modified_base 22: mod_base = OTHER; note = 2'O-methyl-adenosine
  modified_base 23: mod_base = um
  misc_feature 1^2: note = phosphorothioate linkage
  misc_feature 2^3: note = phosphorothioate linkage
  misc_feature 21^22: note = phosphorothioate linkage
  misc_feature 22^23: note = phosphorothioate linkage
ttctccatgaggaccaccagcat

SEQ ID NO: 525 - RNA, 23 nt, synthetic construct
  source 1..23: mol_type = other RNA
  misc_feature 1..23: note = Antisense: ETXS958; corresponding to SEQ ID NO: 125
  modified_base 1: mod_base = um
  modified_base 2: mod_base = OTHER; note = 2' Fluoro-guanosine
  modified_base 3: mod_base = cm
  modified_base 4: mod_base = OTHER; note = 2' Fluoro-cytidine
  modified_base 5: mod_base = um
  modified_base 6: mod_base = OTHER; note = 2' Fluoro-cytidine
  modified_base 7: mod_base = OTHER; note = 2'O-methyl-adenosine
  modified_base 8: mod_base = OTHER; note = 2' Fluoro-uridine
  modified_base 9: mod_base = OTHER; note = 2' Fluoro-guanosine
  modified_base 10: mod_base = gm
  modified_base 11: mod_base = OTHER; note = 2'O-methyl-adenosine
  modified_base 12: mod_base = gm
  modified_base 13: mod_base = OTHER; note = 2'O-methyl-adenosine
  modified_base 14: mod_base = OTHER; note = 2' Fluoro-uridine
  modified_base 15: mod_base = cm
  modified_base 16: mod_base = OTHER; note = 2' Fluoro-uridine
  modified_base 17: mod_base = um
  modified_base 18: mod_base = um
  modified_base 19: mod_base = cm
  modified_base 20: mod_base = gm
  modified_base 21: mod_base = cm
  modified_base 22: mod_base = OTHER; note = 2'O-methyl-adenosine
  modified_base 23: mod_base = gm
  misc_feature 1^2: note = phosphorothioate linkage
  misc_feature 2^3: note = phosphorothioate linkage
  misc_feature 21^22: note = phosphorothioate linkage
  misc_feature 22^23: note = phosphorothioate linkage
tgcctcatggagatctttcgcag

SEQ ID NO: 526 - RNA, 23 nt, synthetic construct
  source 1..23: mol_type = other RNA
  misc_feature 1..23: note = Antisense: ETXS960; corresponding to SEQ ID NO: 126
  modified_base 1: mod_base = OTHER; note = 2'O-methyl-adenosine
  modified_base 2: mod_base = OTHER; note = 2' Fluoro-guanosine
  modified_base 3: mod_base = cm
  modified_base 4: mod_base = OTHER; note = 2'Fluoro-adenosine
  modified_base 5: mod_base = gm
  modified_base 6: mod_base = OTHER; note = 2' Fluoro-cytidine
  modified_base 7: mod_base = um
  modified_base 8: mod_base = OTHER; note = 2' Fluoro-cytidine
  modified_base 9: mod_base = OTHER; note = 2'Fluoro-adenosine
  modified_base 10: mod_base = um
  modified_base 11: mod_base = gm
  modified_base 12: mod_base = cm
  modified_base 13: mod_base = OTHER; note = 2'O-methyl-adenosine
  modified_base 14: mod_base = OTHER; note = 2' Fluoro-uridine
  modified_base 15: mod_base = cm
  modified_base 16: mod_base = OTHER; note = 2' Fluoro-uridine
  modified_base 17: mod_base = cm
  modified_base 18: mod_base = OTHER; note = 2'O-methyl-adenosine
  modified_base 19: mod_base = um
  modified_base 20: mod_base = OTHER; note = 2'O-methyl-adenosine
  modified_base 21: mod_base = cm
  modified_base 22: mod_base = um
  modified_base 23: mod_base = um
  misc_feature 1^2: note = phosphorothioate linkage
  misc_feature 2^3: note = phosphorothioate linkage
  misc_feature 21^22: note = phosphorothioate linkage
  misc_feature 22^23: note = phosphorothioate linkage
agcagctcatgcatctcatactt

SEQ ID NO: 527 - RNA, 23 nt, synthetic construct
  source 1..23: mol_type = other RNA
  misc_feature 1..23: note = Antisense: ETXS962; corresponding to SEQ ID NO: 127
  modified_base 1: mod_base = um
  modified_base 2: mod_base = OTHER; note = 2' Fluoro-cytidine
  modified_base 3: mod_base = OTHER; note = 2'O-methyl-adenosine
  modified_base 4: mod_base = OTHER; note = 2' Fluoro-guanosine
  modified_base 5: mod_base = gm
  modified_base 6: mod_base = OTHER; note = 2'Fluoro-adenosine
  modified_base 7: mod_base = um
  modified_base 8: mod_base = OTHER; note = 2' Fluoro-uridine
  modified_base 9: mod_base = OTHER; note = 2'Fluoro-adenosine
  modified_base 10: mod_base = OTHER; note = 2'O-methyl-adenosine
  modified_base 11: mod_base = um
  modified_base 12: mod_base = cm
  modified_base 13: mod_base = um
  modified_base 14: mod_base = OTHER; note = 2' Fluoro-cytidine
  modified_base 15: mod_base = OTHER; note = 2'O-methyl-adenosine
  modified_base 16: mod_base = OTHER; note = 2' Fluoro-uridine
  modified_base 17: mod_base = cm
  modified_base 18: mod_base = OTHER; note = 2'O-methyl-adenosine
  modified_base 19: mod_base = OTHER; note = 2'O-methyl-adenosine
  modified_base 20: mod_base = OTHER; note = 2'O-methyl-adenosine
  modified_base 21: mod_base = cm
  modified_base 22: mod_base = OTHER; note = 2'O-methyl-adenosine
  modified_base 23: mod_base = gm
  misc_feature 1^2: note = phosphorothioate linkage
  misc_feature 2^3: note = phosphorothioate linkage
  misc_feature 21^22: note = phosphorothioate linkage
  misc_feature 22^23: note = phosphorothioate linkage
tcaggattaatctcatcaaacag

SEQ ID NO: 528 - RNA, 23 nt, synthetic construct
  source 1..23: mol_type = other RNA
  misc_feature 1..23: note = Antisense: ETXS964; corresponding to SEQ ID NO: 128
  modified_base 1: mod_base = um
  modified_base 2: mod_base = OTHER; note = 2' Fluoro-uridine
  modified_base 3: mod_base = gm
  modified_base 4: mod_base = OTHER; note = 2' Fluoro-guanosine
  modified_base 5: mod_base = um
  modified_base 6: mod_base = OTHER; note = 2' Fluoro-uridine
  modified_base 7: mod_base = um
  modified_base 8: mod_base = OTHER; note = 2' Fluoro-cytidine
  modified_base 9: mod_base = OTHER; note = 2'Fluoro-adenosine
  modified_base 10: mod_base = gm
  modified_base 11: mod_base = gm
  modified_base 12: mod_base = OTHER; note = 2'O-methyl-adenosine
  modified_base 13: mod_base = um
  modified_base 14: mod_base = OTHER; note = 2' Fluoro-uridine
  modified_base 15: mod_base = OTHER; note = 2'O-methyl-adenosine
  modified_base 16: mod_base = OTHER; note = 2'Fluoro-adenosine
  modified_base 17: mod_base = um
  modified_base 18: mod_base = cm
  modified_base 19: mod_base = um
  modified_base 20: mod_base = cm
  modified_base 21: mod_base = OTHER; note = 2'O-methyl-adenosine
  modified_base 22: mod_base = um
  modified_base 23: mod_base = cm
  misc_feature 1^2: note = phosphorothioate linkage
  misc_feature 2^3: note = phosphorothioate linkage
  misc_feature 21^22: note = phosphorothioate linkage
  misc_feature 22^23: note = phosphorothioate linkage
ttggtttcaggattaatctcatc

SEQ ID NO: 529 - RNA, 23 nt, synthetic construct
  source 1..23: mol_type = other RNA
  misc_feature 1..23: note = Antisense: ETXS966; corresponding to SEQ ID NO: 129
  modified_base 1: mod_base = gm
  modified_base 2: mod_base = OTHER; note = 2' Fluoro-uridine
  modified_base 3: mod_base = um
  modified_base 4: mod_base = OTHER; note = 2' Fluoro-uridine
  modified_base 5: mod_base = cm
  modified_base 6: mod_base = OTHER; note = 2'Fluoro-adenosine
  modified_base 7: mod_base = gm
  modified_base 8: mod_base = OTHER; note = 2' Fluoro-guanosine
  modified_base 9: mod_base = OTHER; note = 2'Fluoro-adenosine
  modified_base 10: mod_base = um
  modified_base 11: mod_base = um
  modified_base 12: mod_base = OTHER; note = 2'O-methyl-adenosine
  modified_base 13: mod_base = OTHER; note = 2'O-methyl-adenosine
  modified_base 14: mod_base = OTHER; note = 2' Fluoro-uridine
  modified_base 15: mod_base = cm
  modified_base 16: mod_base = OTHER; note = 2' Fluoro-uridine
  modified_base 17: mod_base = cm
  modified_base 18: mod_base = OTHER; note = 2'O-methyl-adenosine
  modified_base 19: mod_base = um
  modified_base 20: mod_base = cm
  modified_base 21: mod_base = OTHER; note = 2'O-methyl-adenosine
  modified_base 22: mod_base = OTHER; note = 2'O-methyl-adenosine
  modified_base 23: mod_base = OTHER; note = 2'O-methyl-adenosine
  misc_feature 1^2: note = phosphorothioate linkage
  misc_feature 2^3: note = phosphorothioate linkage
  misc_feature 21^22: note = phosphorothioate linkage
  misc_feature 22^23: note = phosphorothioate linkage
gtttcaggattaatctcatcaaa

SEQ ID NO: 530 - RNA, 23 nt, synthetic construct
  source 1..23: mol_type = other RNA
  misc_feature 1..23: note = Antisense: ETXS968; corresponding to SEQ ID NO: 130
  modified_base 1: mod_base = um
  modified_base 2: mod_base = OTHER; note = 2' Fluoro-guanosine
  modified_base 3: mod_base = gm
  modified_base 4: mod_base = OTHER; note = 2' Fluoro-uridine
  modified_base 5: mod_base = um
  modified_base 6: mod_base = OTHER; note = 2' Fluoro-uridine
  modified_base 7: mod_base = cm
  modified_base 8: mod_base = OTHER; note = 2'Fluoro-adenosine
  modified_base 9: mod_base = OTHER; note = 2' Fluoro-guanosine
  modified_base 10: mod_base = gm
  modified_base 11: mod_base = OTHER; note = 2'O-methyl-adenosine
  modified_base 12: mod_base = um
  modified_base 13: mod_base = um
  modified_base 14: mod_base = OTHER; note = 2'Fluoro-adenosine
  modified_base 15: mod_base = OTHER; note = 2'O-methyl-adenosine
  modified_base 16: mod_base = OTHER; note = 2' Fluoro-uridine
  modified_base 17: mod_base = cm
  modified_base 18: mod_base = um
  modified_base 19: mod_base = cm
  modified_base 20: mod_base = OTHER; note = 2'O-methyl-adenosine
  modified_base 21: mod_base = um
  modified_base 22: mod_base = cm
  modified_base 23: mod_base = OTHER; note = 2'O-methyl-adenosine
  misc_feature 1^2: note = phosphorothioate linkage
  misc_feature 2^3: note = phosphorothioate linkage
  misc_feature 21^22: note = phosphorothioate linkage
  misc_feature 22^23: note = phosphorothioate linkage
tggtttcaggattaatctcatca

SEQ ID NO: 531 - RNA, 23 nt, synthetic construct
  source 1..23: mol_type = other RNA
  misc_feature 1..23: note = Antisense: ETXS970; corresponding to SEQ ID NO: 131
  modified_base 1: mod_base = gm
  modified_base 2: mod_base = OTHER; note = 2' Fluoro-guanosine
  modified_base 3: mod_base = um
  modified_base 4: mod_base = OTHER; note = 2' Fluoro-uridine
  modified_base 5: mod_base = um
  modified_base 6: mod_base = OTHER; note = 2' Fluoro-cytidine
  modified_base 7: mod_base = OTHER; note = 2'O-methyl-adenosine
  modified_base 8: mod_base = OTHER; note = 2' Fluoro-guanosine
  modified_base 9: mod_base = OTHER; note = 2' Fluoro-guanosine
  modified_base 10: mod_base = OTHER; note = 2'O-methyl-adenosine
  modified_base 11: mod_base = um
  modified_base 12: mod_base = um
  modified_base 13: mod_base = OTHER; note = 2'O-methyl-adenosine
  modified_base 14: mod_base = OTHER; note = 2'Fluoro-adenosine
  modified_base 15: mod_base = um
  modified_base 16: mod_base = OTHER; note = 2' Fluoro-cytidine
  modified_base 17: mod_base = um
  modified_base 18: mod_base = cm
  modified_base 19: mod_base = OTHER; note = 2'O-methyl-adenosine
  modified_base 20: mod_base = um
  modified_base 21: mod_base = cm
  modified_base 22: mod_base = OTHER; note = 2'O-methyl-adenosine
  modified_base 23: mod_base = OTHER; note = 2'O-methyl-adenosine
  misc_feature 1^2: note = phosphorothioate linkage
  misc_feature 2^3: note = phosphorothioate linkage
  misc_feature 21^22: note = phosphorothioate linkage
  misc_feature 22^23: note = phosphorothioate linkage
ggtttcaggattaatctcatcaa

SEQ ID NO: 532 - RNA, 23 nt, synthetic construct
  source 1..23: mol_type = other RNA
  misc_feature 1..23: note = Antisense: ETXS972; corresponding to SEQ ID NO: 132
  modified_base 1: mod_base = OTHER; note = 2'O-methyl-adenosine
  modified_base 2: mod_base = OTHER; note = 2' Fluoro-guanosine
  modified_base 3: mod_base = gm
  modified_base 4: mod_base = OTHER; note = 2'Fluoro-adenosine
  modified_base 5: mod_base = um
  modified_base 6: mod_base = OTHER; note = 2' Fluoro-uridine
  modified_base 7: mod_base = OTHER; note = 2'O-methyl-adenosine
  modified_base 8: mod_base = OTHER; note = 2'Fluoro-adenosine
  modified_base 9: mod_base = OTHER; note = 2' Fluoro-uridine
  modified_base 10: mod_base = cm
  modified_base 11: mod_base = um
  modified_base 12: mod_base = cm
  modified_base 13: mod_base = OTHER; note = 2'O-methyl-adenosine
  modified_base 14: mod_base = OTHER; note = 2' Fluoro-uridine
  modified_base 15: mod_base = cm
  modified_base 16: mod_base = OTHER; note = 2'Fluoro-adenosine
  modified_base 17: mod_base = OTHER; note = 2'O-methyl-adenosine
  modified_base 18: mod_base = OTHER; note = 2'O-methyl-adenosine
  modified_base 19: mod_base = cm
  modified_base 20: mod_base = OTHER; note = 2'O-methyl-adenosine
  modified_base 21: mod_base = gm
  modified_base 22: mod_base = um
  modified_base 23: mod_base = um
  misc_feature 1^2: note = phosphorothioate linkage
  misc_feature 2^3: note = phosphorothioate linkage
  misc_feature 21^22: note = phosphorothioate linkage
  misc_feature 22^23: note = phosphorothioate linkage
aggattaatctcatcaaacagtt

SEQ ID NO: 533 - RNA, 23 nt, synthetic construct
  source 1..23: mol_type = other RNA
  misc_feature 1..23: note = Antisense: ETXS974; corresponding to SEQ ID NO: 133
  modified_base 1: mod_base = um
  modified_base 2: mod_base = OTHER; note = 2' Fluoro-cytidine
  modified_base 3: mod_base = cm
  modified_base 4: mod_base = OTHER; note = 2' Fluoro-uridine
  modified_base 5: mod_base = um
  modified_base 6: mod_base = OTHER; note = 2' Fluoro-guanosine
  modified_base 7: mod_base = um
  modified_base 8: mod_base = OTHER; note = 2' Fluoro-guanosine
  modified_base 9: mod_base = OTHER; note = 2' Fluoro-guanosine
  modified_base 10: mod_base = OTHER; note = 2'O-methyl-adenosine
  modified_base 11: mod_base = um
  modified_base 12: mod_base = gm
  modified_base 13: mod_base = OTHER; note = 2'O-methyl-adenosine
  modified_base 14: mod_base = OTHER; note = 2'Fluoro-adenosine
  modified_base 15: mod_base = gm
  modified_base 16: mod_base = OTHER; note = 2' Fluoro-guanosine
  modified_base 17: mod_base = cm
  modified_base 18: mod_base = OTHER; note = 2'O-methyl-adenosine
  modified_base 19: mod_base = OTHER; note = 2'O-methyl-adenosine
  modified_base 20: mod_base = OTHER; note = 2'O-methyl-adenosine
  modified_base 21: mod_base = OTHER; note = 2'O-methyl-adenosine
  modified_base 22: mod_base = cm
  modified_base 23: mod_base = um
  misc_feature 1^2: note = phosphorothioate linkage
  misc_feature 2^3: note = phosphorothioate linkage
  misc_feature 21^22: note = phosphorothioate linkage
  misc_feature 22^23: note = phosphorothioate linkage
tccttgtggatgaaggcaaaact

SEQ ID NO: 534 - RNA, 23 nt, synthetic construct
  source 1..23: mol_type = other RNA
  misc_feature 1..23: note = Antisense: ETXS976; corresponding to SEQ ID NO: 134
  modified_base 1: mod_base = gm
  modified_base 2: mod_base = OTHER; note = 2' Fluoro-uridine
  modified_base 3: mod_base = gm
  modified_base 4: mod_base = OTHER; note = 2' Fluoro-cytidine
  modified_base 5: mod_base = cm
  modified_base 6: mod_base = OTHER; note = 2' Fluoro-uridine
  modified_base 7: mod_base = cm
  modified_base 8: mod_base = OTHER; note = 2'Fluoro-adenosine
  modified_base 9: mod_base = OTHER; note = 2' Fluoro-uridine
  modified_base 10: mod_base = gm
  modified_base 11: mod_base = gm
  modified_base 12: mod_base = OTHER; note = 2'O-methyl-adenosine
  modified_base 13: mod_base = gm
  modified_base 14: mod_base = OTHER; note = 2'Fluoro-adenosine
  modified_base 15: mod_base = um
  modified_base 16: mod_base = OTHER; note = 2' Fluoro-cytidine
  modified_base 17: mod_base = um
  modified_base 18: mod_base = um
  modified_base 19: mod_base = um
  modified_base 20: mod_base = cm
  modified_base 21: mod_base = gm
  modified_base 22: mod_base = cm
  modified_base 23: mod_base = OTHER; note = 2'O-methyl-adenosine
  misc_feature 1^2: note = phosphorothioate linkage
  misc_feature 2^3: note = phosphorothioate linkage
  misc_feature 21^22: note = phosphorothioate linkage
  misc_feature 22^23: note = phosphorothioate linkage
gtgcctcatggagatctttcgca

SEQ ID NO: 535 - RNA, 23 nt, synthetic construct
  source 1..23: mol_type = other RNA
  misc_feature 1..23: note = Antisense: ETXS978; corresponding to SEQ ID NO: 135
  modified_base 1: mod_base = um
  modified_base 2: mod_base = OTHER; note = 2' Fluoro-cytidine
  modified_base 3: mod_base = um
  modified_base 4: mod_base = OTHER; note = 2' Fluoro-cytidine
  modified_base 5: mod_base = cm
  modified_base 6: mod_base = OTHER; note = 2'Fluoro-adenosine
  modified_base 7: mod_base = um
  modified_base 8: mod_base = OTHER; note = 2' Fluoro-guanosine
  modified_base 9: mod_base = OTHER; note = 2'Fluoro-adenosine
  modified_base 10: mod_base = gm
  modified_base 11: mod_base = gm
  modified_base 12: mod_base = OTHER; note = 2'O-methyl-adenosine
  modified_base 13: mod_base = cm
  modified_base 14: mod_base = OTHER; note = 2' Fluoro-cytidine
  modified_base 15: mod_base = OTHER; note = 2'O-methyl-adenosine
  modified_base 16: mod_base = OTHER; note = 2' Fluoro-cytidine
  modified_base 17: mod_base = cm
  modified_base 18: mod_base = OTHER; note = 2'O-methyl-adenosine
  modified_base 19: mod_base = gm
  modified_base 20: mod_base = cm
  modified_base 21: mod_base = OTHER; note = 2'O-methyl-adenosine
  modified_base 22: mod_base = um
  modified_base 23: mod_base = gm
  misc_feature 1^2: note = phosphorothioate linkage
  misc_feature 2^3: note = phosphorothioate linkage
  misc_feature 21^22: note = phosphorothioate linkage
  misc_feature 22^23: note = phosphorothioate linkage
tctccatgaggaccaccagcatg

SEQ ID NO: 536 - RNA, 23 nt, synthetic construct
  source 1..23: mol_type = other RNA
  misc_feature 1..23: note = Antisense: ETXS980; corresponding to SEQ ID NO: 136
  modified_base 1: mod_base = cm
  modified_base 2: mod_base = OTHER; note = 2'Fluoro-adenosine
  modified_base 3: mod_base = OTHER; note = 2'O-methyl-adenosine
  modified_base 4: mod_base = OTHER; note = 2'Fluoro-adenosine
  modified_base 5: mod_base = OTHER; note = 2'O-methyl-adenosine
  modified_base 6: mod_base = OTHER; note = 2' Fluoro-uridine
  modified_base 7: mod_base = cm
  modified_base 8: mod_base = OTHER; note = 2' Fluoro-cytidine
  modified_base 9: mod_base = OTHER; note = 2' Fluoro-uridine
  modified_base 10: mod_base = um
  modified_base 11: mod_base = gm
  modified_base 12: mod_base = um
  modified_base 13: mod_base = gm
  modified_base 14: mod_base = OTHER; note = 2' Fluoro-guanosine
  modified_base 15: mod_base = OTHER; note = 2'O-methyl-adenosine
  modified_base 16: mod_base = OTHER; note = 2' Fluoro-uridine
  modified_base 17: mod_base = gm
  modified_base 18: mod_base = OTHER; note = 2'O-methyl-adenosine
  modified_base 19: mod_base = OTHER; note = 2'O-methyl-adenosine
  modified_base 20: mod_base = gm
  modified_base 21: mod_base = gm
  modified_base 22: mod_base = cm
  modified_base 23: mod_base = OTHER; note = 2'O-methyl-adenosine
  misc_feature 1^2: note = phosphorothioate linkage
  misc_feature 2^3: note = phosphorothioate linkage
  misc_feature 21^22: note = phosphorothioate linkage
  misc_feature 22^23: note = phosphorothioate linkage
caaaatccttgtggatgaaggca

SEQ ID NO: 537 - RNA, 23 nt, synthetic construct
  source 1..23: mol_type = other RNA
  misc_feature 1..23: note = Antisense: ETXS982; corresponding to SEQ ID NO: 137
  modified_base 1: mod_base = cm
  modified_base 2: mod_base = OTHER; note = 2' Fluoro-guanosine
  modified_base 3: mod_base = um
  modified_base 4: mod_base = OTHER; note = 2' Fluoro-guanosine
  modified_base 5: mod_base = cm
  modified_base 6: mod_base = OTHER; note = 2' Fluoro-cytidine
  modified_base 7: mod_base = um
  modified_base 8: mod_base = OTHER; note = 2' Fluoro-cytidine
  modified_base 9: mod_base = OTHER; note = 2'Fluoro-adenosine
  modified_base 10: mod_base = um
  modified_base 11: mod_base = gm
  modified_base 12: mod_base = gm
  modified_base 13: mod_base = OTHER; note = 2'O-methyl-adenosine
  modified_base 14: mod_base = OTHER; note = 2' Fluoro-guanosine
  modified_base 15: mod_base = OTHER; note = 2'O-methyl-adenosine
  modified_base 16: mod_base = OTHER; note = 2' Fluoro-uridine
  modified_base 17: mod_base = cm
  modified_base 18: mod_base = um
  modified_base 19: mod_base = um
  modified_base 20: mod_base = um
  modified_base 21: mod_base = cm
  modified_base 22: mod_base = gm
  modified_base 23: mod_base = cm
  misc_feature 1^2: note = phosphorothioate linkage
  misc_feature 2^3: note = phosphorothioate linkage
  misc_feature 21^22: note = phosphorothioate linkage
  misc_feature 22^23: note = phosphorothioate linkage
cgtgcctcatggagatctttcgc

SEQ ID NO: 538 - RNA, 23 nt, synthetic construct
  source 1..23: mol_type = other RNA
  misc_feature 1..23: note = Antisense: ETXS984; corresponding to SEQ ID NO: 138
  modified_base 1: mod_base = OTHER; note = 2'O-methyl-adenosine
  modified_base 2: mod_base = OTHER; note = 2' Fluoro-uridine
  modified_base 3: mod_base = cm
  modified_base 4: mod_base = OTHER; note = 2'Fluoro-adenosine
  modified_base 5: mod_base = OTHER; note = 2'O-methyl-adenosine
  modified_base 6: mod_base = OTHER; note = 2'Fluoro-adenosine
  modified_base 7: mod_base = OTHER; note = 2'O-methyl-adenosine
  modified_base 8: mod_base = OTHER; note = 2' Fluoro-uridine
  modified_base 9: mod_base = OTHER; note = 2' Fluoro-cytidine
  modified_base 10: mod_base = cm
  modified_base 11: mod_base = um
  modified_base 12: mod_base = um
  modified_base 13: mod_base = gm
  modified_base 14: mod_base = OTHER; note = 2' Fluoro-uridine
  modified_base 15: mod_base = gm
  modified_base 16: mod_base = OTHER; note = 2' Fluoro-guanosine
  modified_base 17: mod_base = OTHER; note = 2'O-methyl-adenosine
  modified_base 18: mod_base = um
  modified_base 19: mod_base = gm
  modified_base 20: mod_base = OTHER; note = 2'O-methyl-adenosine
  modified_base 21: mod_base = OTHER; note = 2'O-methyl-adenosine
  modified_base 22: mod_base = gm
  modified_base 23: mod_base = gm
  misc_feature 1^2: note = phosphorothioate linkage
  misc_feature 2^3: note = phosphorothioate linkage
  misc_feature 21^22: note = phosphorothioate linkage
  misc_feature 22^23: note = phosphorothioate linkage
atcaaaatccttgtggatgaagg

SEQ ID NO: 539 - RNA, 23 nt, synthetic construct
  source 1..23: mol_type = other RNA
  misc_feature 1..23: note = Antisense: ETXS986; corresponding to SEQ ID NO: 139
  modified_base 1: mod_base = um
  modified_base 2: mod_base = OTHER; note = 2' Fluoro-uridine
  modified_base 3: mod_base = cm
  modified_base 4: mod_base = OTHER; note = 2'Fluoro-adenosine
  modified_base 5: mod_base = gm
  modified_base 6: mod_base = OTHER; note = 2' Fluoro-guanosine
  modified_base 7: mod_base = OTHER; note = 2'O-methyl-adenosine
  modified_base 8: mod_base = OTHER; note = 2' Fluoro-uridine
  modified_base 9: mod_base = OTHER; note = 2' Fluoro-uridine
  modified_base 10: mod_base = OTHER; note = 2'O-methyl-adenosine
  modified_base 11: mod_base = OTHER; note = 2'O-methyl-adenosine
  modified_base 12: mod_base = um
  modified_base 13: mod_base = cm
  modified_base 14: mod_base = OTHER; note = 2' Fluoro-uridine
  modified_base 15: mod_base = cm
  modified_base 16: mod_base = OTHER; note = 2'Fluoro-adenosine
  modified_base 17: mod_base = um
  modified_base 18: mod_base = cm
  modified_base 19: mod_base = OTHER; note = 2'O-methyl-adenosine
  modified_base 20: mod_base = OTHER; note = 2'O-methyl-adenosine
  modified_base 21: mod_base = OTHER; note = 2'O-methyl-adenosine
  modified_base 22: mod_base = cm
  modified_base 23: mod_base = OTHER; note = 2'O-methyl-adenosine
  misc_feature 1^2: note = phosphorothioate linkage
  misc_feature 2^3: note = phosphorothioate linkage
  misc_feature 21^22: note = phosphorothioate linkage
  misc_feature 22^23: note = phosphorothioate linkage
ttcaggattaatctcatcaaaca

SEQ ID NO: 540 - RNA, 23 nt, synthetic construct
  source 1..23: mol_type = other RNA
  misc_feature 1..23: note = Antisense: ETXS988; corresponding to SEQ ID NO: 140
  modified_base 1: mod_base = OTHER; note = 2'O-methyl-adenosine
  modified_base 2: mod_base = OTHER; note = 2'Fluoro-adenosine
  modified_base 3: mod_base = um
  modified_base 4: mod_base = OTHER; note = 2' Fluoro-cytidine
  modified_base 5: mod_base = cm
  modified_base 6: mod_base = OTHER; note = 2' Fluoro-uridine
  modified_base 7: mod_base = um
  modified_base 8: mod_base = OTHER; note = 2' Fluoro-guanosine
  modified_base 9: mod_base = OTHER; note = 2' Fluoro-uridine
  modified_base 10: mod_base = gm
  modified_base 11: mod_base = gm
  modified_base 12: mod_base = OTHER; note = 2'O-methyl-adenosine
  modified_base 13: mod_base = um
  modified_base 14: mod_base = OTHER; note = 2' Fluoro-guanosine
  modified_base 15: mod_base = OTHER; note = 2'O-methyl-adenosine
  modified_base 16: mod_base = OTHER; note = 2'Fluoro-adenosine
  modified_base 17: mod_base = gm
  modified_base 18: mod_base = gm
  modified_base 19: mod_base = cm
  modified_base 20: mod_base = OTHER; note = 2'O-methyl-adenosine
  modified_base 21: mod_base = OTHER; note = 2'O-methyl-adenosine
  modified_base 22: mod_base = OTHER; note = 2'O-methyl-adenosine
  modified_base 23: mod_base = OTHER; note = 2'O-methyl-adenosine
  misc_feature 1^2: note = phosphorothioate linkage
  misc_feature 2^3: note = phosphorothioate linkage
  misc_feature 21^22: note = phosphorothioate linkage
  misc_feature 22^23: note = phosphorothioate linkage
aatccttgtggatgaaggcaaaa

SEQ ID NO: 541 - RNA, 23 nt, synthetic construct
  source 1..23: mol_type = other RNA
  misc_feature 1..23: note = Antisense: ETXS990; corresponding to SEQ ID NO: 141
  modified_base 1: mod_base = cm
  modified_base 2: mod_base = OTHER; note = 2' Fluoro-cytidine
  modified_base 3: mod_base = OTHER; note = 2'O-methyl-adenosine
  modified_base 4: mod_base = OTHER; note = 2' Fluoro-uridine
  modified_base 5: mod_base = cm
  modified_base 6: mod_base = OTHER; note = 2' Fluoro-guanosine
  modified_base 7: mod_base = um
  modified_base 8: mod_base = OTHER; note = 2' Fluoro-guanosine
  modified_base 9: mod_base = OTHER; note = 2' Fluoro-cytidine
  modified_base 10: mod_base = cm
  modified_base 11: mod_base = um
  modified_base 12: mod_base = cm
  modified_base 13: mod_base = OTHER; note = 2'O-methyl-adenosine
  modified_base 14: mod_base = OTHER; note = 2' Fluoro-uridine
  modified_base 15: mod_base = gm
  modified_base 16: mod_base = OTHER; note = 2' Fluoro-guanosine
  modified_base 17: mod_base = OTHER; note = 2'O-methyl-adenosine
  modified_base 18: mod_base = gm
  modified_base 19: mod_base = OTHER; note = 2'O-methyl-adenosine
  modified_base 20: mod_base = um
  modified_base 21: mod_base = cm
  modified_base 22: mod_base = um
  modified_base 23: mod_base = um
  misc_feature 1^2: note = phosphorothioate linkage
  misc_feature 2^3: note = phosphorothioate linkage
  misc_feature 21^22: note = phosphorothioate linkage
  misc_feature 22^23: note = phosphorothioate linkage
ccatcgtgcctcatggagatctt

SEQ ID NO: 542 - RNA, 23 nt, synthetic construct
  source 1..23: mol_type = other RNA
  misc_feature 1..23: note = Antisense: ETXS992; corresponding to SEQ ID NO: 122
  modified_base 1: mod_base = OTHER; note = 2'O-methyl-adenosine
  modified_base 2: mod_base = OTHER; note = 2'Fluoro-adenosine
  modified_base 3: mod_base = OTHER; note = 2'O-methyl-adenosine
  modified_base 4: mod_base = OTHER; note = 2' Fluoro-uridine
  modified_base 5: mod_base = cm
  modified_base 6: mod_base = OTHER; note = 2' Fluoro-cytidine
  modified_base 7: mod_base = um
  modified_base 8: mod_base = um
  modified_base 9: mod_base = gm
  modified_base 10: mod_base = um
  modified_base 11: mod_base = gm
  modified_base 12: mod_base = gm
  modified_base 13: mod_base = OTHER; note = 2'O-methyl-adenosine
  modified_base 14: mod_base = OTHER; note = 2' Fluoro-uridine
  modified_base 15: mod_base = gm
  modified_base 16: mod_base = OTHER; note = 2'Fluoro-adenosine
  modified_base 17: mod_base = OTHER; note = 2'O-methyl-adenosine
  modified_base 18: mod_base = gm
  modified_base 19: mod_base = gm
  modified_base 20: mod_base = cm
  modified_base 21: mod_base = OTHER; note = 2'O-methyl-adenosine
  modified_base 22: mod_base = OTHER; note = 2'O-methyl-adenosine
  modified_base 23: mod_base = OTHER; note = 2'O-methyl-adenosine
  misc_feature 1^2: note = phosphorothioate linkage
  misc_feature 2^3: note = phosphorothioate linkage
  misc_feature 21^22: note = phosphorothioate linkage
  misc_feature 22^23: note = phosphorothioate linkage
aaatccttgtggatgaaggcaaa

SEQ ID NO: 543 - RNA, 23 nt, synthetic construct
  source 1..23: mol_type = other RNA
  misc_feature 1..23: note = Antisense: ETXS994; corresponding to SEQ ID NO: 123
  modified_base 1: mod_base = gm
  modified_base 2: mod_base = OTHER; note = 2' Fluoro-cytidine
  modified_base 3: mod_base = cm
  modified_base 4: mod_base = OTHER; note = 2' Fluoro-uridine
  modified_base 5: mod_base = cm
  modified_base 6: mod_base = OTHER; note = 2'Fluoro-adenosine
  modified_base 7: mod_base = um
  modified_base 8: mod_base = gm
  modified_base 9: mod_base = gm
  modified_base 10: mod_base = OTHER; note = 2'O-methyl-adenosine
  modified_base 11: mod_base = gm
  modified_base 12: mod_base = OTHER; note = 2'O-methyl-adenosine
  modified_base 13: mod_base = um
  modified_base 14: mod_base = OTHER; note = 2' Fluoro-cytidine
  modified_base 15: mod_base = um
  modified_base 16: mod_base = OTHER; note = 2' Fluoro-uridine
  modified_base 17: mod_base = um
  modified_base 18: mod_base = cm
  modified_base 19: mod_base = gm
  modified_base 20: mod_base = cm
  modified_base 21: mod_base = OTHER; note = 2'O-methyl-adenosine
  modified_base 22: mod_base = gm
  modified_base 23: mod_base = cm
  misc_feature 1^2: note = phosphorothioate linkage
  misc_feature 2^3: note = phosphorothioate linkage
  misc_feature 21^22: note = phosphorothioate linkage
  misc_feature 22^23: note = phosphorothioate linkage
gcctcatggagatctttcgcagc

SEQ ID NO: 544 - RNA, 23 nt, synthetic construct
  source 1..23: mol_type = other RNA
  misc_feature 1..23: note = Antisense: ETXS996; corresponding to SEQ ID NO: 124
  modified_base 1: mod_base = um
  modified_base 2: mod_base = OTHER; note = 2' Fluoro-uridine
  modified_base 3: mod_base = cm
  modified_base 4: mod_base = OTHER; note = 2' Fluoro-uridine
  modified_base 5: mod_base = cm
  modified_base 6: mod_base = OTHER; note = 2' Fluoro-cytidine
  modified_base 7: mod_base = OTHER; note = 2'O-methyl-adenosine
  modified_base 8: mod_base = um
  modified_base 9: mod_base = gm
  modified_base 10: mod_base = OTHER; note = 2'O-methyl-adenosine
  modified_base 11: mod_base = gm
  modified_base 12: mod_base = gm
  modified_base 13: mod_base = OTHER; note = 2'O-methyl-adenosine
  modified_base 14: mod_base = OTHER; note = 2' Fluoro-cytidine
  modified_base 15: mod_base = cm
  modified_base 16: mod_base = OTHER; note = 2'Fluoro-adenosine
  modified_base 17: mod_base = cm
  modified_base 18: mod_base = cm
  modified_base 19: mod_base = OTHER; note = 2'O-methyl-adenosine
  modified_base 20: mod_base = gm
  modified_base 21: mod_base = cm
  modified_base 22: mod_base = OTHER; note = 2'O-methyl-adenosine
  modified_base 23: mod_base = um
  misc_feature 1^2: note = phosphorothioate linkage
  misc_feature 2^3: note = phosphorothioate linkage
  misc_feature 21^22: note = phosphorothioate linkage
  misc_feature 22^23: note = phosphorothioate linkage
ttctccatgaggaccaccagcat

SEQ ID NO: 545 - RNA, 23 nt, synthetic construct
  source 1..23: mol_type = other RNA
  misc_feature 1..23: note = Antisense: ETXS998; corresponding to SEQ ID NO: 125
  modified_base 1: mod_base = um
  modified_base 2: mod_base = OTHER; note = 2' Fluoro-guanosine
  modified_base 3: mod_base = cm
  modified_base 4: mod_base = OTHER; note = 2' Fluoro-cytidine
  modified_base 5: mod_base = um
  modified_base 6: mod_base = OTHER; note = 2' Fluoro-cytidine
  modified_base 7: mod_base = OTHER; note = 2'O-methyl-adenosine
  modified_base 8: mod_base = um
  modified_base 9: mod_base = gm
  modified_base 10: mod_base = gm
  modified_base 11: mod_base = OTHER; note = 2'O-methyl-adenosine
  modified_base 12: mod_base = gm
  modified_base 13: mod_base = OTHER; note = 2'O-methyl-adenosine
  modified_base 14: mod_base = OTHER; note = 2' Fluoro-uridine
  modified_base 15: mod_base = cm
  modified_base 16: mod_base = OTHER; note = 2' Fluoro-uridine
  modified_base 17: mod_base = um
  modified_base 18: mod_base = um
  modified_base 19: mod_base = cm
  modified_base 20: mod_base = gm
  modified_base 21: mod_base = cm
  modified_base 22: mod_base = OTHER; note = 2'O-methyl-adenosine
  modified_base 23: mod_base = gm
  misc_feature 1^2: note = phosphorothioate linkage
  misc_feature 2^3: note = phosphorothioate linkage
  misc_feature 21^22: note = phosphorothioate linkage
  misc_feature 22^23: note = phosphorothioate linkage
tgcctcatggagatctttcgcag

SEQ ID NO: 546 - RNA, 23 nt, synthetic construct
  source 1..23: mol_type = other RNA
  misc_feature 1..23: note = Antisense: ETXS1000; corresponding to SEQ ID NO: 126
  modified_base 1: mod_base = OTHER; note = 2'O-methyl-adenosine
  modified_base 2: mod_base = OTHER; note = 2' Fluoro-guanosine
  modified_base 3: mod_base = cm
  modified_base 4: mod_base = OTHER; note = 2'Fluoro-adenosine
  modified_base 5: mod_base = gm
  modified_base 6: mod_base = OTHER; note = 2' Fluoro-cytidine
  modified_base 7: mod_base = um
  modified_base 8: mod_base = cm
  modified_base 9: mod_base = OTHER; note = 2'O-methyl-adenosine
  modified_base 10: mod_base = um
  modified_base 11: mod_base = gm
  modified_base 12: mod_base = cm
  modified_base 13: mod_base = OTHER; note = 2'O-methyl-adenosine
  modified_base 14: mod_base = OTHER; note = 2' Fluoro-uridine
  modified_base 15: mod_base = cm
  modified_base 16: mod_base = OTHER; note = 2' Fluoro-uridine
  modified_base 17: mod_base = cm
  modified_base 18: mod_base = OTHER; note = 2'O-methyl-adenosine
  modified_base 19: mod_base = um
  modified_base 20: mod_base = OTHER; note = 2'O-methyl-adenosine
  modified_base 21: mod_base = cm
  modified_base 22: mod_base = um
  modified_base 23: mod_base = um
  misc_feature 1^2: note = phosphorothioate linkage
  misc_feature 2^3: note = phosphorothioate linkage
  misc_feature 21^22: note = phosphorothioate linkage
  misc_feature 22^23: note = phosphorothioate linkage
agcagctcatgcatctcatactt

SEQ ID NO: 547 - RNA, 23 nt, synthetic construct
  source 1..23: mol_type = other RNA
  misc_feature 1..23: note = Antisense: ETXS1002; corresponding to SEQ ID NO: 127
  modified_base 1: mod_base = um
  modified_base 2: mod_base = OTHER; note = 2' Fluoro-cytidine
  modified_base 3: mod_base = OTHER; note = 2'O-methyl-adenosine
  modified_base 4: mod_base = OTHER; note = 2' Fluoro-guanosine
  modified_base 5: mod_base = gm
  modified_base 6: mod_base = OTHER; note = 2'Fluoro-adenosine
  modified_base 7: mod_base = um
  modified_base 8: mod_base = um
  modified_base 9: mod_base = OTHER; note = 2'O-methyl-adenosine
  modified_base 10: mod_base = OTHER; note = 2'O-methyl-adenosine
  modified_base 11: mod_base = um
  modified_base 12: mod_base = cm
  modified_base 13: mod_base = um
  modified_base 14: mod_base = OTHER; note = 2' Fluoro-cytidine
  modified_base 15: mod_base = OTHER; note = 2'O-methyl-adenosine
  modified_base 16: mod_base = OTHER; note = 2' Fluoro-uridine
  modified_base 17: mod_base = cm
  modified_base 18: mod_base = OTHER; note = 2'O-methyl-adenosine
  modified_base 19: mod_base = OTHER; note = 2'O-methyl-adenosine
  modified_base 20: mod_base = OTHER; note = 2'O-methyl-adenosine
  modified_base 21: mod_base = cm
  modified_base 22: mod_base = OTHER; note = 2'O-methyl-adenosine
  modified_base 23: mod_base = gm
  misc_feature 1^2: note = phosphorothioate linkage
  misc_feature 2^3: note = phosphorothioate linkage
  misc_feature 21^22: note = phosphorothioate linkage
  misc_feature 22^23: note = phosphorothioate linkage
tcaggattaatctcatcaaacag

SEQ ID NO: 548 - RNA, 23 nt, synthetic construct
  source 1..23: mol_type = other RNA
  misc_feature 1..23: note = Antisense: ETXS1004; corresponding to SEQ ID NO: 128
  modified_base 1: mod_base = um
  modified_base 2: mod_base = OTHER; note = 2' Fluoro-uridine
  modified_base 3: mod_base = gm
  modified_base 4: mod_base = OTHER; note = 2' Fluoro-guanosine
  modified_base 5: mod_base = um
  modified_base 6: mod_base = OTHER; note = 2' Fluoro-uridine
  modified_base 7: mod_base = um
  modified_base 8: mod_base = cm
  modified_base 9: mod_base = OTHER; note = 2'O-methyl-adenosine
  modified_base 10: mod_base = gm
  modified_base 11: mod_base = gm
  modified_base 12: mod_base = OTHER; note = 2'O-methyl-adenosine
  modified_base 13: mod_base = um
  modified_base 14: mod_base = OTHER; note = 2' Fluoro-uridine
  modified_base 15: mod_base = OTHER; note = 2'O-methyl-adenosine
  modified_base 16: mod_base = OTHER; note = 2'Fluoro-adenosine
  modified_base 17: mod_base = um
  modified_base 18: mod_base = cm
  modified_base 19: mod_base = um
  modified_base 20: mod_base = cm
  modified_base 21: mod_base = OTHER; note = 2'O-methyl-adenosine
  modified_base 22: mod_base = um
  modified_base 23: mod_base = cm
  misc_feature 1^2: note = phosphorothioate linkage
  misc_feature 2^3: note = phosphorothioate linkage
  misc_feature 21^22: note = phosphorothioate linkage
  misc_feature 22^23: note = phosphorothioate linkage
ttggtttcaggattaatctcatc

SEQ ID NO: 549 - RNA, 23 nt, synthetic construct
  source 1..23: mol_type = other RNA
  misc_feature 1..23: note = Antisense: ETXS1006; corresponding to SEQ ID NO: 129
  modified_base 1: mod_base = gm
  modified_base 2: mod_base = OTHER; note = 2' Fluoro-uridine
  modified_base 3: mod_base = um
  modified_base 4: mod_base = OTHER; note = 2' Fluoro-uridine
  modified_base 5: mod_base = cm
  modified_base 6: mod_base = OTHER; note = 2'Fluoro-adenosine
  modified_base 7: mod_base = gm
  modified_base 8: mod_base = gm
  modified_base 9: mod_base = OTHER; note = 2'O-methyl-adenosine
  modified_base 10: mod_base = um
  modified_base 11: mod_base = um
  modified_base 12: mod_base = OTHER; note = 2'O-methyl-adenosine
  modified_base 13: mod_base = OTHER; note = 2'O-methyl-adenosine
  modified_base 14: mod_base = OTHER; note = 2' Fluoro-uridine
  modified_base 15: mod_base = cm
  modified_base 16: mod_base = OTHER; note = 2' Fluoro-uridine
  modified_base 17: mod_base = cm
  modified_base 18: mod_base = OTHER; note = 2'O-methyl-adenosine
  modified_base 19: mod_base = um
  modified_base 20: mod_base = cm
  modified_base 21: mod_base = OTHER; note = 2'O-methyl-adenosine
  modified_base 22: mod_base = OTHER; note = 2'O-methyl-adenosine
  modified_base 23: mod_base = OTHER; note = 2'O-methyl-adenosine
  misc_feature 1^2: note = phosphorothioate linkage
  misc_feature 2^3: note = phosphorothioate linkage
  misc_feature 21^22: note = phosphorothioate linkage
  misc_feature 22^23: note = phosphorothioate linkage
gtttcaggattaatctcatcaaa

SEQ ID NO: 550 - RNA, 23 nt, synthetic construct
  source 1..23: mol_type = other RNA
  misc_feature 1..23: note = Antisense: ETXS1008; corresponding to SEQ ID NO: 130
  modified_base 1: mod_base = um
  modified_base 2: mod_base = OTHER; note = 2' Fluoro-guanosine
  modified_base 3: mod_base = gm
  modified_base 4: mod_base = OTHER; note = 2' Fluoro-uridine
  modified_base 5: mod_base = um
  modified_base 6: mod_base = OTHER; note = 2' Fluoro-uridine
  modified_base 7: mod_base = cm
  modified_base 8: mod_base = OTHER; note = 2'O-methyl-adenosine
  modified_base 9: mod_base = gm
  modified_base 10: mod_base = gm
  modified_base 11: mod_base = OTHER; note = 2'O-methyl-adenosine
  modified_base 12: mod_base = um
  modified_base 13: mod_base = um
  modified_base 14: mod_base = OTHER; note = 2'Fluoro-adenosine
  modified_base 15: mod_base = OTHER; note = 2'O-methyl-adenosine
  modified_base 16: mod_base = OTHER; note = 2' Fluoro-uridine
  modified_base 17: mod_base = cm
  modified_base 18: mod_base = um
  modified_base 19: mod_base = cm
  modified_base 20: mod_base = OTHER; note = 2'O-methyl-adenosine
  modified_base 21: mod_base = um
  modified_base 22: mod_base = cm
  modified_base 23: mod_base = OTHER; note = 2'O-methyl-adenosine
  misc_feature 1^2: note = phosphorothioate linkage
  misc_feature 2^3: note = phosphorothioate linkage
  misc_feature 21^22: note = phosphorothioate linkage
  misc_feature 22^23: note = phosphorothioate linkage
tggtttcaggattaatctcatca

SEQ ID NO: 551 - RNA, 23 nt, synthetic construct
  source 1..23: mol_type = other RNA
  misc_feature 1..23: note = Antisense: ETXS1010; corresponding to SEQ ID NO: 131
  modified_base 1: mod_base = gm
  modified_base 2: mod_base = OTHER; note = 2' Fluoro-guanosine
  modified_base 3: mod_base = um
  modified_base 4: mod_base = OTHER; note = 2' Fluoro-uridine
  modified_base 5: mod_base = um
  modified_base 6: mod_base = OTHER; note = 2' Fluoro-cytidine
  modified_base 7: mod_base = OTHER; note = 2'O-methyl-adenosine
  modified_base 8: mod_base = gm
  modified_base 9: mod_base = gm
  modified_base 10: mod_base = OTHER; note = 2'O-methyl-adenosine
  modified_base 11: mod_base = um
  modified_base 12: mod_base = um
  modified_base 13: mod_base = OTHER; note = 2'O-methyl-adenosine
  modified_base 14: mod_base = OTHER; note = 2'Fluoro-adenosine
  modified_base 15: mod_base = um
  modified_base 16: mod_base = OTHER; note = 2' Fluoro-cytidine
  modified_base 17: mod_base = um
  modified_base 18: mod_base = cm
  modified_base 19: mod_base = OTHER; note = 2'O-methyl-adenosine
  modified_base 20: mod_base = um
  modified_base 21: mod_base = cm
  modified_base 22: mod_base = OTHER; note = 2'O-methyl-adenosine
  modified_base 23: mod_base = OTHER; note = 2'O-methyl-adenosine
  misc_feature 1^2: note = phosphorothioate linkage
  misc_feature 2^3: note = phosphorothioate linkage
  misc_feature 21^22: note = phosphorothioate linkage
  misc_feature 22^23: note = phosphorothioate linkage
ggtttcaggattaatctcatcaa

SEQ ID NO: 552 - RNA, 23 nt, synthetic construct
  source 1..23: mol_type = other RNA
  misc_feature 1..23: note = Antisense: ETXS1012; corresponding to SEQ ID NO: 132
  modified_base 1: mod_base = OTHER; note = 2'O-methyl-adenosine
  modified_base 2: mod_base = OTHER; note = 2' Fluoro-guanosine
  modified_base 3: mod_base = gm
  modified_base 4: mod_base = OTHER; note = 2'Fluoro-adenosine
  modified_base 5: mod_base = um
  modified_base 6: mod_base = OTHER; note = 2' Fluoro-uridine
  modified_base 7: mod_base = OTHER; note = 2'O-methyl-adenosine
  modified_base 8: mod_base = OTHER; note = 2'O-methyl-adenosine
  modified_base 9: mod_base = um
  modified_base 10: mod_base = cm
  modified_base 11: mod_base = um
  modified_base 12: mod_base = cm
  modified_base 13: mod_base = OTHER; note = 2'O-methyl-adenosine
  modified_base 14: mod_base = OTHER; note = 2' Fluoro-uridine
  modified_base 15: mod_base = cm
  modified_base 16: mod_base = OTHER; note = 2'Fluoro-adenosine
  modified_base 17: mod_base = OTHER; note = 2'O-methyl-adenosine
  modified_base 18: mod_base = OTHER; note = 2'O-methyl-adenosine
  modified_base 19: mod_base = cm
  modified_base 20: mod_base = OTHER; note = 2'O-methyl-adenosine
  modified_base 21: mod_base = gm
  modified_base 22: mod_base = um
  modified_base 23: mod_base = um
  misc_feature 1^2: note = phosphorothioate linkage
  misc_feature 2^3: note = phosphorothioate linkage
  misc_feature 21^22: note = phosphorothioate linkage
  misc_feature 22^23: note = phosphorothioate linkage
aggattaatctcatcaaacagtt

SEQ ID NO: 553 - RNA, 23 nt, synthetic construct
  source 1..23: mol_type = other RNA
  misc_feature 1..23: note = Antisense: ETXS1014; corresponding to SEQ ID NO: 133
  modified_base 1: mod_base = um
  modified_base 2: mod_base = OTHER; note = 2' Fluoro-cytidine
  modified_base 3: mod_base = cm
  modified_base 4: mod_base = OTHER; note = 2' Fluoro-uridine
  modified_base 5: mod_base = um
  modified_base 6: mod_base = OTHER; note = 2' Fluoro-guanosine
  modified_base 7: mod_base = um
  modified_base 8: mod_base = gm
  modified_base 9: mod_base = gm
  modified_base 10: mod_base = OTHER; note = 2'O-methyl-adenosine
  modified_base 11: mod_base = um
  modified_base 12: mod_base = gm
  modified_base 13: mod_base = OTHER; note = 2'O-methyl-adenosine
  modified_base 14: mod_base = OTHER; note = 2'Fluoro-adenosine
  modified_base 15: mod_base = gm
  modified_base 16: mod_base = OTHER; note = 2' Fluoro-guanosine
  modified_base 17: mod_base = cm
  modified_base 18: mod_base = OTHER; note = 2'O-methyl-adenosine
  modified_base 19: mod_base = OTHER; note = 2'O-methyl-adenosine
  modified_base 20: mod_base = OTHER; note = 2'O-methyl-adenosine
  modified_base 21: mod_base = OTHER; note = 2'O-methyl-adenosine
  modified_base 22: mod_base = cm
  modified_base 23: mod_base = um
  misc_feature 1^2: note = phosphorothioate linkage
  misc_feature 2^3: note = phosphorothioate linkage
  misc_feature 21^22: note = phosphorothioate linkage
  misc_feature 22^23: note = phosphorothioate linkage
tccttgtggatgaaggcaaaact

SEQ ID NO: 554 - RNA, 23 nt, synthetic construct
  source 1..23: mol_type = other RNA
  misc_feature 1..23: note = Antisense: ETXS1016; corresponding to SEQ ID NO: 134
  modified_base 1: mod_base = gm
  modified_base 2: mod_base = OTHER; note = 2' Fluoro-uridine
  modified_base 3: mod_base = gm
  modified_base 4: mod_base = OTHER; note = 2' Fluoro-cytidine
  modified_base 5: mod_base = cm
  modified_base 6: mod_base = OTHER; note = 2' Fluoro-uridine
  modified_base 7: mod_base = cm
  modified_base 8: mod_base = OTHER; note = 2'O-methyl-adenosine
  modified_base 9: mod_base = um
  modified_base 10: mod_base = gm
  modified_base 11: mod_base = gm
  modified_base 12: mod_base = OTHER; note = 2'O-methyl-adenosine
  modified_base 13: mod_base = gm
  modified_base 14: mod_base = OTHER; note = 2'Fluoro-adenosine
  modified_base 15: mod_base = um
  modified_base 16: mod_base = OTHER; note = 2' Fluoro-cytidine
  modified_base 17: mod_base = um
  modified_base 18: mod_base = um
  modified_base 19: mod_base = um
  modified_base 20: mod_base = cm
  modified_base 21: mod_base = gm
  modified_base 22: mod_base = cm
  modified_base 23: mod_base = OTHER; note = 2'O-methyl-adenosine
  misc_feature 1^2: note = phosphorothioate linkage
  misc_feature 2^3: note = phosphorothioate linkage
  misc_feature 21^22: note = phosphorothioate linkage
  misc_feature 22^23: note = phosphorothioate linkage
gtgcctcatggagatctttcgca

SEQ ID NO: 555 - RNA, 23 nt, synthetic construct
  source 1..23: mol_type = other RNA
  misc_feature 1..23: note = Antisense: ETXS1018; corresponding to SEQ ID NO: 135
  modified_base 1: mod_base = um
  modified_base 2: mod_base = OTHER; note = 2' Fluoro-cytidine
  modified_base 3: mod_base = um
  modified_base 4: mod_base = OTHER; note = 2' Fluoro-cytidine
  modified_base 5: mod_base = cm
  modified_base 6: mod_base = OTHER; note = 2'Fluoro-adenosine
  modified_base 7: mod_base = um
  modified_base 8: mod_base = gm
  modified_base 9: mod_base = OTHER; note = 2'O-methyl-adenosine
  modified_base 10: mod_base = gm
  modified_base 11: mod_base = gm
  modified_base 12: mod_base = OTHER; note = 2'O-methyl-adenosine
  modified_base 13: mod_base = cm
  modified_base 14: mod_base = OTHER; note = 2' Fluoro-cytidine
  modified_base 15: mod_base = OTHER; note = 2'O-methyl-adenosine
  modified_base 16: mod_base = OTHER; note = 2' Fluoro-cytidine
  modified_base 17: mod_base = cm
  modified_base 18: mod_base = OTHER; note = 2'O-methyl-adenosine
  modified_base 19: mod_base = gm
  modified_base 20: mod_base = cm
  modified_base 21: mod_base = OTHER; note = 2'O-methyl-adenosine
  modified_base 22: mod_base = um
  modified_base 23: mod_base = gm
  misc_feature 1^2: note = phosphorothioate linkage
  misc_feature 2^3: note = phosphorothioate linkage
  misc_feature 21^22: note = phosphorothioate linkage
  misc_feature 22^23: note = phosphorothioate linkage
tctccatgaggaccaccagcatg

SEQ ID NO: 556 - RNA, 23 nt, synthetic construct
  source 1..23: mol_type = other RNA
  misc_feature 1..23: note = Antisense: ETXS1020; corresponding to SEQ ID NO: 136
  modified_base 1: mod_base = cm
  modified_base 2: mod_base = OTHER; note = 2'Fluoro-adenosine
  modified_base 3: mod_base = OTHER; note = 2'O-methyl-adenosine
  modified_base 4: mod_base = OTHER; note = 2'Fluoro-adenosine
  modified_base 5: mod_base = OTHER; note = 2'O-methyl-adenosine
  modified_base 6: mod_base = OTHER; note = 2' Fluoro-uridine
  modified_base 7: mod_base = cm
  modified_base 8: mod_base = cm
  modified_base 9: mod_base = um
  modified_base 10: mod_base = um
  modified_base 11: mod_base = gm
  modified_base 12: mod_base = um
  modified_base 13: mod_base = gm
  modified_base 14: mod_base = OTHER; note = 2' Fluoro-guanosine
  modified_base 15: mod_base = OTHER; note = 2'O-methyl-adenosine
  modified_base 16: mod_base = OTHER; note = 2' Fluoro-uridine
  modified_base 17: mod_base = gm
  modified_base 18: mod_base = OTHER; note = 2'O-methyl-adenosine
  modified_base 19: mod_base = OTHER; note = 2'O-methyl-adenosine
  modified_base 20: mod_base = gm
  modified_base 21: mod_base = gm
  modified_base 22: mod_base = cm
  modified_base 23: mod_base = OTHER; note = 2'O-methyl-adenosine
  misc_feature 1^2: note = phosphorothioate linkage
  misc_feature 2^3: note = phosphorothioate linkage
  misc_feature 21^22: note = phosphorothioate linkage
  misc_feature 22^23: note = phosphorothioate linkage
caaaatccttgtggatgaaggca

SEQ ID NO: 557 - RNA, 23 nt, synthetic construct
  source 1..23: mol_type = other RNA
  misc_feature 1..23: note = Antisense: ETXS1022; corresponding to SEQ ID NO: 137
  modified_base 1: mod_base = cm
  modified_base 2: mod_base = OTHER; note = 2' Fluoro-guanosine
  modified_base 3: mod_base = um
  modified_base 4: mod_base = OTHER; note = 2' Fluoro-guanosine
  modified_base 5: mod_base = cm
  modified_base 6: mod_base = OTHER; note = 2' Fluoro-cytidine
  modified_base 7: mod_base = um
  modified_base 8: mod_base = cm
  modified_base 9: mod_base = OTHER; note = 2'O-methyl-adenosine
  modified_base 10: mod_base = um
  modified_base 11: mod_base = gm
  modified_base 12: mod_base = gm
  modified_base 13: mod_base = OTHER; note = 2'O-methyl-adenosine
  modified_base 14: mod_base = OTHER; note = 2' Fluoro-guanosine
  modified_base 15: mod_base = OTHER; note = 2'O-methyl-adenosine
  modified_base 16: mod_base = OTHER; note = 2' Fluoro-uridine
  modified_base 17: mod_base = cm
  modified_base 18: mod_base = um
  modified_base 19: mod_base = um
  modified_base 20: mod_base = um
  modified_base 21: mod_base = cm
  modified_base 22: mod_base = gm
  modified_base 23: mod_base = cm
  misc_feature 1^2: note = phosphorothioate linkage
  misc_feature 2^3: note = phosphorothioate linkage
  misc_feature 21^22: note = phosphorothioate linkage
  misc_feature 22^23: note = phosphorothioate linkage
cgtgcctcatggagatctttcgc

SEQ ID NO: 558 - RNA, 23 nt, synthetic construct
  source 1..23: mol_type = other RNA
  misc_feature 1..23: note = Antisense: ETXS1024; corresponding to SEQ ID NO: 138
  modified_base 1: mod_base = OTHER; note = 2'O-methyl-adenosine
  modified_base 2: mod_base = OTHER; note = 2' Fluoro-uridine
  modified_base 3: mod_base = cm
  modified_base 4: mod_base = OTHER; note = 2'Fluoro-adenosine
  modified_base 5: mod_base = OTHER; note = 2'O-methyl-adenosine
  modified_base 6: mod_base = OTHER; note = 2'Fluoro-adenosine
  modified_base 7: mod_base = OTHER; note = 2'O-methyl-adenosine
  modified_base 8: mod_base = um
  modified_base 9: mod_base = cm
  modified_base 10: mod_base = cm
  modified_base 11: mod_base = um
  modified_base 12: mod_base = um
  modified_base 13: mod_base = gm
  modified_base 14: mod_base = OTHER; note = 2' Fluoro-uridine
  modified_base 15: mod_base = gm
  modified_base 16: mod_base = OTHER; note = 2' Fluoro-guanosine
  modified_base 17: mod_base = OTHER; note = 2'O-methyl-adenosine
  modified_base 18: mod_base = um
  modified_base 19: mod_base = gm
  modified_base 20: mod_base = OTHER; note = 2'O-methyl-adenosine
  modified_base 21: mod_base = OTHER; note = 2'O-methyl-adenosine
  modified_base 22: mod_base = gm
  modified_base 23: mod_base = gm
  misc_feature 1^2: note = phosphorothioate linkage
  misc_feature 2^3: note = phosphorothioate linkage
  misc_feature 21^22: note = phosphorothioate linkage
  misc_feature 22^23: note = phosphorothioate linkage
atcaaaatccttgtggatgaagg

SEQ ID NO: 559 - RNA, 23 nt, synthetic construct
  source 1..23: mol_type = other RNA
  misc_feature 1..23: note = Antisense: ETXS1026; corresponding to SEQ ID NO: 139
  modified_base 1: mod_base = um
  modified_base 2: mod_base = OTHER; note = 2' Fluoro-uridine
  modified_base 3: mod_base = cm
  modified_base 4: mod_base = OTHER; note = 2'Fluoro-adenosine
  modified_base 5: mod_base = gm
  modified_base 6: mod_base = OTHER; note = 2' Fluoro-guanosine
  modified_base 7: mod_base = OTHER; note = 2'O-methyl-adenosine
  modified_base 8: mod_base = um
  modified_base 9: mod_base = um
  modified_base 10: mod_base = OTHER; note = 2'O-methyl-adenosine
  modified_base 11: mod_base = OTHER; note = 2'O-methyl-adenosine
  modified_base 12: mod_base = um
  modified_base 13: mod_base = cm
  modified_base 14: mod_base = OTHER; note = 2' Fluoro-uridine
  modified_base 15: mod_base = cm
  modified_base 16: mod_base = OTHER; note = 2'Fluoro-adenosine
  modified_base 17: mod_base = um
  modified_base 18: mod_base = cm
  modified_base 19: mod_base = OTHER; note = 2'O-methyl-adenosine
  modified_base 20: mod_base = OTHER; note = 2'O-methyl-adenosine
  modified_base 21: mod_base = OTHER; note = 2'O-methyl-adenosine
  modified_base 22: mod_base = cm
  modified_base 23: mod_base = OTHER; note = 2'O-methyl-adenosine
  misc_feature 1^2: note = phosphorothioate linkage
  misc_feature 2^3: note = phosphorothioate linkage
  misc_feature 21^22: note = phosphorothioate linkage
  misc_feature 22^23: note = phosphorothioate linkage
ttcaggattaatctcatcaaaca

SEQ ID NO: 560 - RNA, 23 nt, synthetic construct
  source 1..23: mol_type = other RNA
  misc_feature 1..23: note = Antisense: ETXS1028; corresponding to SEQ ID NO: 140
  modified_base 1: mod_base = OTHER; note = 2'O-methyl-adenosine
  modified_base 2: mod_base = OTHER; note = 2'Fluoro-adenosine
  modified_base 3: mod_base = um
  modified_base 4: mod_base = OTHER; note = 2' Fluoro-cytidine
  modified_base 5: mod_base = cm
  modified_base 6: mod_base = OTHER; note = 2' Fluoro-uridine
  modified_base 7: mod_base = um
  modified_base 8: mod_base = gm
  modified_base 9: mod_base = um
  modified_base 10: mod_base = gm
  modified_base 11: mod_base = gm
  modified_base 12: mod_base = OTHER; note = 2'O-methyl-adenosine
  modified_base 13: mod_base = um
  modified_base 14: mod_base = OTHER; note = 2' Fluoro-guanosine
  modified_base 15: mod_base = OTHER; note = 2'O-methyl-adenosine
  modified_base 16: mod_base = OTHER; note = 2'Fluoro-adenosine
  modified_base 17: mod_base = gm
  modified_base 18: mod_base = gm
  modified_base 19: mod_base = cm
  modified_base 20: mod_base = OTHER; note = 2'O-methyl-adenosine
  modified_base 21: mod_base = OTHER; note = 2'O-methyl-adenosine
  modified_base 22: mod_base = OTHER; note = 2'O-methyl-adenosine
  modified_base 23: mod_base = OTHER; note = 2'O-methyl-adenosine
  misc_feature 1^2: note = phosphorothioate linkage
  misc_feature 2^3: note = phosphorothioate linkage
  misc_feature 21^22: note = phosphorothioate linkage
  misc_feature 22^23: note = phosphorothioate linkage
aatccttgtggatgaaggcaaaa

SEQ ID NO: 561 - RNA, 23 nt, synthetic construct
  source 1..23: mol_type = other RNA
  misc_feature 1..23: note = Antisense: ETXS1030; corresponding to SEQ ID NO: 141
  modified_base 1: mod_base = cm
  modified_base 2: mod_base = OTHER; note = 2' Fluoro-cytidine
  modified_base 3: mod_base = OTHER; note = 2'O-methyl-adenosine
  modified_base 4: mod_base = OTHER; note = 2' Fluoro-uridine
  modified_base 5: mod_base = cm
  modified_base 6: mod_base = OTHER; note = 2' Fluoro-guanosine
  modified_base 7: mod_base = um
  modified_base 8: mod_base = gm
  modified_base 9: mod_base = cm
  modified_base 10: mod_base = cm
  modified_base 11: mod_base = um
  modified_base 12: mod_base = cm
  modified_base 13: mod_base = OTHER; note = 2'O-methyl-adenosine
  modified_base 14: mod_base = OTHER; note = 2' Fluoro-uridine
  modified_base 15: mod_base = gm
  modified_base 16: mod_base = OTHER; note = 2' Fluoro-guanosine
  modified_base 17: mod_base = OTHER; note = 2'O-methyl-adenosine
  modified_base 18: mod_base = gm
  modified_base 19: mod_base = OTHER; note = 2'O-methyl-adenosine
  modified_base 20: mod_base = um
  modified_base 21: mod_base = cm
  modified_base 22: mod_base = um
  modified_base 23: mod_base = um
  misc_feature 1^2: note = phosphorothioate linkage
  misc_feature 2^3: note = phosphorothioate linkage
  misc_feature 21^22: note = phosphorothioate linkage
  misc_feature 22^23: note = phosphorothioate linkage
ccatcgtgcctcatggagatctt

SEQ ID NO: 562 - RNA, 21 nt, synthetic construct
  source 1..21: mol_type = other RNA
  misc_feature 1..21: note = Description: ZPI siRNA sense strand: ETXS631; corresponding to SEQ ID NO: 242
  modified_base 1: mod_base = um
  modified_base 2: mod_base = gm
  modified_base 3: mod_base = cm
  modified_base 4: mod_base = cm
  modified_base 5: mod_base = um
  modified_base 6: mod_base = um
  modified_base 7: mod_base = OTHER; note = 2' Fluoro-cytidine
  modified_base 8: mod_base = OTHER; note = 2'O-methyl-adenosine
  modified_base 9: mod_base = OTHER; note = 2' Fluoro-uridine
  modified_base 10: mod_base = OTHER; note = 2' Fluoro-cytidine
  modified_base 11: mod_base = OTHER; note = 2' Fluoro-cytidine
  modified_base 12: mod_base = OTHER; note = 2'O-methyl-adenosine
  modified_base 13: mod_base = cm
  modified_base 14: mod_base = OTHER; note = 2'O-methyl-adenosine
  modified_base 15: mod_base = OTHER; note = 2'O-methyl-adenosine
  modified_base 16: mod_base = gm
  modified_base 17: mod_base = gm
  modified_base 18: mod_base = OTHER; note = 2'O-methyl-adenosine
  modified_base 19: mod_base = um
  modified_base 20: mod_base = um
  modified_base 21: mod_base = um
  misc_feature 1^2: note = phosphorothioate linkage
  misc_feature 2^3: note = phosphorothioate linkage
tgccttcatccacaaggattt

SEQ ID NO: 563 - RNA, 21 nt, synthetic construct
  source 1..21: mol_type = other RNA
  misc_feature 1..21: note = Description: ZPI siRNA sense strand: ETXS633; corresponding to SEQ ID NO: 243
  modified_base 1: mod_base = um
  modified_base 2: mod_base = gm
  modified_base 3: mod_base = cm
  modified_base 4: mod_base = gm
  modified_base 5: mod_base = OTHER; note = 2'O-methyl-adenosine
  modified_base 6: mod_base = OTHER; note = 2'O-methyl-adenosine
  modified_base 7: mod_base = OTHER; note = Af
  modified_base 8: mod_base = gm
  modified_base 9: mod_base = OTHER; note = Af
  modified_base 10: mod_base = OTHER; note = 2' Fluoro-uridine
  modified_base 11: mod_base = OTHER; note = 2' Fluoro-cytidine
  modified_base 12: mod_base = um
  modified_base 13: mod_base = cm
  modified_base 14: mod_base = cm
  modified_base 15: mod_base = OTHER; note = 2'O-methyl-adenosine
  modified_base 16: mod_base = um
  modified_base 17: mod_base = gm
  modified_base 18: mod_base = OTHER; note = 2'O-methyl-adenosine
  modified_base 19: mod_base = gm
  modified_base 20: mod_base = gm
  modified_base 21: mod_base = cm
  misc_feature 1^2: note = phosphorothioate linkage
  misc_feature 2^3: note = phosphorothioate linkage
tgcgaaagatctccatgaggc

SEQ ID NO: 564 - RNA, 21 nt, synthetic construct
  source 1..21: mol_type = other RNA
  misc_feature 1..21: note = Description: ZPI siRNA sense strand: ETXS635; corresponding to SEQ ID NO: 244
  modified_base 1: mod_base = gm
  modified_base 2: mod_base = cm
  modified_base 3: mod_base = um
  modified_base 4: mod_base = gm
  modified_base 5: mod_base = gm
  modified_base 6: mod_base = um
  modified_base 7: mod_base = OTHER; note = 2' Fluoro-guanosine
  modified_base 8: mod_base = gm
  modified_base 9: mod_base = OTHER; note = 2' Fluoro-uridine
  modified_base 10: mod_base = OTHER; note = 2' Fluoro-cytidine
  modified_base 11: mod_base = OTHER; note = 2' Fluoro-cytidine
  modified_base 12: mod_base = um
  modified_base 13: mod_base = cm
  modified_base 14: mod_base = OTHER; note = 2'O-methyl-adenosine
  modified_base 15: mod_base = um
  modified_base 16: mod_base = gm
  modified_base 17: mod_base = gm
  modified_base 18: mod_base = OTHER; note = 2'O-methyl-adenosine
  modified_base 19: mod_base = gm
  modified_base 20: mod_base = OTHER; note = 2'O-methyl-adenosine
  modified_base 21: mod_base = OTHER; note = 2'O-methyl-adenosine
  misc_feature 1^2: note = phosphorothioate linkage
  misc_feature 2^3: note = phosphorothioate linkage
gctggtggtcctcatggagaa

SEQ ID NO: 565 - RNA, 21 nt, synthetic construct
  source 1..21: mol_type = other RNA
  misc_feature 1..21: note = Description: ZPI siRNA sense strand: ETXS637; corresponding to SEQ ID NO: 245
  modified_base 1: mod_base = gm
  modified_base 2: mod_base = cm
  modified_base 3: mod_base = gm
  modified_base 4: mod_base = OTHER; note = 2'O-methyl-adenosine
  modified_base 5: mod_base = OTHER; note = 2'O-methyl-adenosine
  modified_base 6: mod_base = OTHER; note = 2'O-methyl-adenosine
  modified_base 7: mod_base = OTHER; note = 2' Fluoro-guanosine
  modified_base 8: mod_base = OTHER; note = 2'O-methyl-adenosine
  modified_base 9: mod_base = OTHER; note = 2' Fluoro-uridine
  modified_base 10: mod_base = OTHER; note = 2' Fluoro-cytidine
  modified_base 11: mod_base = OTHER; note = 2' Fluoro-uridine
  modified_base 12: mod_base = cm
  modified_base 13: mod_base = cm
  modified_base 14: mod_base = OTHER; note = 2'O-methyl-adenosine
  modified_base 15: mod_base = um
  modified_base 16: mod_base = gm
  modified_base 17: mod_base = OTHER; note = 2'O-methyl-adenosine
  modified_base 18: mod_base = gm
  modified_base 19: mod_base = gm
  modified_base 20: mod_base = cm
  modified_base 21: mod_base = OTHER; note = 2'O-methyl-adenosine
  misc_feature 1^2: note = phosphorothioate linkage
  misc_feature 2^3: note = phosphorothioate linkage
gcgaaagatctccatgaggca

SEQ ID NO: 566 - RNA, 21 nt, synthetic construct
  source 1..21: mol_type = other RNA
  misc_feature 1..21: note = Description: ZPI siRNA sense strand: ETXS639; corresponding to SEQ ID NO: 246
  modified_base 1: mod_base = gm
  modified_base 2: mod_base = um
  modified_base 3: mod_base = OTHER; note = 2'O-methyl-adenosine
  modified_base 4: mod_base = um
  modified_base 5: mod_base = gm
  modified_base 6: mod_base = OTHER; note = 2'O-methyl-adenosine
  modified_base 7: mod_base = OTHER; note = 2' Fluoro-guanosine
  modified_base 8: mod_base = OTHER; note = 2'O-methyl-adenosine
  modified_base 9: mod_base = OTHER; note = 2' Fluoro-uridine
  modified_base 10: mod_base = OTHER; note = 2' Fluoro-guanosine
  modified_base 11: mod_base = OTHER; note = 2' Fluoro-cytidine
  modified_base 12: mod_base = OTHER; note = 2'O-methyl-adenosine
  modified_base 13: mod_base = um
  modified_base 14: mod_base = gm
  modified_base 15: mod_base = OTHER; note = 2'O-methyl-adenosine
  modified_base 16: mod_base = gm
  modified_base 17: mod_base = cm
  modified_base 18: mod_base = um
  modified_base 19: mod_base = gm
  modified_base 20: mod_base = cm
  modified_base 21: mod_base = um
  misc_feature 1^2: note = phosphorothioate linkage
  misc_feature 2^3: note = phosphorothioate linkage
gtatgagatgcatgagctgct

SEQ ID NO: 567 - RNA, 21 nt, synthetic construct
  source 1..21: mol_type = other RNA
  misc_feature 1..21: note = Description: ZPI siRNA sense strand: ETXS641; corresponding to SEQ ID NO: 247
  modified_base 1: mod_base = gm
  modified_base 2: mod_base = um
  modified_base 3: mod_base = um
  modified_base 4: mod_base = um
  modified_base 5: mod_base = gm
  modified_base 6: mod_base = OTHER; note = 2'O-methyl-adenosine
  modified_base 7: mod_base = OTHER; note = 2' Fluoro-uridine
  modified_base 8: mod_base = gm
  modified_base 9: mod_base = OTHER; note = Af
  modified_base 10: mod_base = OTHER; note = 2' Fluoro-guanosine
  modified_base 11: mod_base = OTHER; note = Af
  modified_base 12: mod_base = um
  modified_base 13: mod_base = um
  modified_base 14: mod_base = OTHER; note = 2'O-methyl-adenosine
  modified_base 15: mod_base = OTHER; note = 2'O-methyl-adenosine
  modified_base 16: mod_base = um
  modified_base 17: mod_base = cm
  modified_base 18: mod_base = cm
  modified_base 19: mod_base = um
  modified_base 20: mod_base = gm
  modified_base 21: mod_base = OTHER; note = 2'O-methyl-adenosine
  misc_feature 1^2: note = phosphorothioate linkage
  misc_feature 2^3: note = phosphorothioate linkage
gtttgatgagattaatcctga

SEQ ID NO: 568 - RNA, 21 nt, synthetic construct
  source 1..21: mol_type = other RNA
  misc_feature 1..21: note = Description: ZPI siRNA sense strand: ETXS643; corresponding to SEQ ID NO: 248
  modified_base 1: mod_base = um
  modified_base 2: mod_base = gm
  modified_base 3: mod_base = OTHER; note = 2'O-methyl-adenosine
  modified_base 4: mod_base = gm
  modified_base 5: mod_base = OTHER; note = 2'O-methyl-adenosine
  modified_base 6: mod_base = um
  modified_base 7: mod_base = OTHER; note = 2' Fluoro-uridine
  modified_base 8: mod_base = OTHER; note = 2'O-methyl-adenosine
  modified_base 9: mod_base = OTHER; note = Af
  modified_base 10: mod_base = OTHER; note = 2' Fluoro-uridine
  modified_base 11: mod_base = OTHER; note = 2' Fluoro-cytidine
  modified_base 12: mod_base = cm
  modified_base 13: mod_base = um
  modified_base 14: mod_base = gm
  modified_base 15: mod_base = OTHER; note = 2'O-methyl-adenosine
  modified_base 16: mod_base = OTHER; note = 2'O-methyl-adenosine
  modified_base 17: mod_base = OTHER; note = 2'O-methyl-adenosine
  modified_base 18: mod_base = cm
  modified_base 19: mod_base = cm
  modified_base 20: mod_base = OTHER; note = 2'O-methyl-adenosine
  modified_base 21: mod_base = OTHER; note = 2'O-methyl-adenosine
  misc_feature 1^2: note = phosphorothioate linkage
  misc_feature 2^3: note = phosphorothioate linkage
tgagattaatcctgaaaccaa

SEQ ID NO: 569 - RNA, 21 nt, synthetic construct
  source 1..21: mol_type = other RNA
  misc_feature 1..21: note = Description: ZPI siRNA sense strand: ETXS645; corresponding to SEQ ID NO: 249
  modified_base 1: mod_base = um
  modified_base 2: mod_base = gm
  modified_base 3: mod_base = OTHER; note = 2'O-methyl-adenosine
  modified_base 4: mod_base = um
  modified_base 5: mod_base = gm
  modified_base 6: mod_base = OTHER; note = 2'O-methyl-adenosine
  modified_base 7: mod_base = OTHER; note = 2' Fluoro-guanosine
  modified_base 8: mod_base = OTHER; note = 2'O-methyl-adenosine
  modified_base 9: mod_base = OTHER; note = 2' Fluoro-uridine
  modified_base 10: mod_base = OTHER; note = 2' Fluoro-uridine
  modified_base 11: mod_base = OTHER; note = Af
  modified_base 12: mod_base = OTHER; note = 2'O-methyl-adenosine
  modified_base 13: mod_base = um
  modified_base 14: mod_base = cm
  modified_base 15: mod_base = cm
  modified_base 16: mod_base = um
  modified_base 17: mod_base = gm
  modified_base 18: mod_base = OTHER; note = 2'O-methyl-adenosine
  modified_base 19: mod_base = OTHER; note = 2'O-methyl-adenosine
  modified_base 20: mod_base = OTHER; note = 2'O-methyl-adenosine
  modified_base 21: mod_base = cm
  misc_feature 1^2: note = phosphorothioate linkage
  misc_feature 2^3: note = phosphorothioate linkage
tgatgagattaatcctgaaac

SEQ ID NO: 570 - RNA, 21 nt, synthetic construct
  source 1..21: mol_type = other RNA
  misc_feature 1..21: note = Description: ZPI siRNA sense strand: ETXS647; corresponding to SEQ ID NO: 250
  modified_base 1: mod_base = OTHER; note = 2'O-methyl-adenosine
  modified_base 2: mod_base = um
  modified_base 3: mod_base = gm
  modified_base 4: mod_base = OTHER; note = 2'O-methyl-adenosine
  modified_base 5: mod_base = gm
  modified_base 6: mod_base = OTHER; note = 2'O-methyl-adenosine
  modified_base 7: mod_base = OTHER; note = 2' Fluoro-uridine
  modified_base 8: mod_base = um
  modified_base 9: mod_base = OTHER; note = Af
  modified_base 10: mod_base = OTHER; note = Af
  modified_base 11: mod_base = OTHER; note = 2' Fluoro-uridine
  modified_base 12: mod_base = cm
  modified_base 13: mod_base = cm
  modified_base 14: mod_base = um
  modified_base 15: mod_base = gm
  modified_base 16: mod_base = OTHER; note = 2'O-methyl-adenosine
  modified_base 17: mod_base = OTHER; note = 2'O-methyl-adenosine
  modified_base 18: mod_base = OTHER; note = 2'O-methyl-adenosine
  modified_base 19: mod_base = cm
  modified_base 20: mod_base = cm
  modified_base 21: mod_base = OTHER; note = 2'O-methyl-adenosine
  misc_feature 1^2: note = phosphorothioate linkage
  misc_feature 2^3: note = phosphorothioate linkage
atgagattaatcctgaaacca

SEQ ID NO: 571 - RNA, 21 nt, synthetic construct
  source 1..21: mol_type = other RNA
  misc_feature 1..21: note = Description: ZPI siRNA sense strand: ETXS649; corresponding to SEQ ID NO: 251
  modified_base 1: mod_base = gm
  modified_base 2: mod_base = OTHER; note = 2'O-methyl-adenosine
  modified_base 3: mod_base = um
  modified_base 4: mod_base = gm
  modified_base 5: mod_base = OTHER; note = 2'O-methyl-adenosine
  modified_base 6: mod_base = gm
  modified_base 7: mod_base = OTHER; note = Af
  modified_base 8: mod_base = um
  modified_base 9: mod_base = OTHER; note = 2' Fluoro-uridine
  modified_base 10: mod_base = OTHER; note = Af
  modified_base 11: mod_base = OTHER; note = Af
  modified_base 12: mod_base = um
  modified_base 13: mod_base = cm
  modified_base 14: mod_base = cm
  modified_base 15: mod_base = um
  modified_base 16: mod_base = gm
  modified_base 17: mod_base = OTHER; note = 2'O-methyl-adenosine
  modified_base 18: mod_base = OTHER; note = 2'O-methyl-adenosine
  modified_base 19: mod_base = OTHER; note = 2'O-methyl-adenosine
  modified_base 20: mod_base = cm
  modified_base 21: mod_base = cm
  misc_feature 1^2: note = phosphorothioate linkage
  misc_feature 2^3: note = phosphorothioate linkage
gatgagattaatcctgaaacc

SEQ ID NO: 572 - RNA, 21 nt, synthetic construct
  source 1..21: mol_type = other RNA
  misc_feature 1..21: note = Description: ZPI siRNA sense strand: ETXS651; corresponding to SEQ ID NO: 252
  modified_base 1: mod_base = cm
  modified_base 2: mod_base = um
  modified_base 3: mod_base = gm
  modified_base 4: mod_base = um
  modified_base 5: mod_base = um
  modified_base 6: mod_base = um
  modified_base 7: mod_base = OTHER; note = 2' Fluoro-guanosine
  modified_base 8: mod_base = OTHER; note = 2'O-methyl-adenosine
  modified_base 9: mod_base = OTHER; note = 2' Fluoro-uridine
  modified_base 10: mod_base = OTHER; note = 2' Fluoro-guanosine
  modified_base 11: mod_base = OTHER; note = Af
  modified_base 12: mod_base = gm
  modified_base 13: mod_base = OTHER; note = 2'O-methyl-adenosine
  modified_base 14: mod_base = um
  modified_base 15: mod_base = um
  modified_base 16: mod_base = OTHER; note = 2'O-methyl-adenosine
  modified_base 17: mod_base = OTHER; note = 2'O-methyl-adenosine
  modified_base 18: mod_base = um
  modified_base 19: mod_base = cm
  modified_base 20: mod_base = cm
  modified_base 21: mod_base = um
  misc_feature 1^2: note = phosphorothioate linkage
  misc_feature 2^3: note = phosphorothioate linkage
ctgtttgatgagattaatcct

SEQ ID NO: 573 - RNA, 21 nt, synthetic construct
  source 1..21: mol_type = other RNA
  misc_feature 1..21: note = Description: ZPI siRNA sense strand: ETXS653; corresponding to SEQ ID NO: 253
  modified_base 1: mod_base = um
  modified_base 2: mod_base = um
  modified_base 3: mod_base = um
  modified_base 4: mod_base = um
  modified_base 5: mod_base = gm
  modified_base 6: mod_base = cm
  modified_base 7: mod_base = OTHER; note = 2' Fluoro-cytidine
  modified_base 8: mod_base = um
  modified_base 9: mod_base = OTHER; note = 2' Fluoro-uridine
  modified_base 10: mod_base = OTHER; note = 2' Fluoro-cytidine
  modified_base 11: mod_base = OTHER; note = Af
  modified_base 12: mod_base = um
  modified_base 13: mod_base = cm
  modified_base 14: mod_base = cm
  modified_base 15: mod_base = OTHER; note = 2'O-methyl-adenosine
  modified_base 16: mod_base = cm
  modified_base 17: mod_base = OTHER; note = 2'O-methyl-adenosine
  modified_base 18: mod_base = OTHER; note = 2'O-methyl-adenosine
  modified_base 19: mod_base = gm
  modified_base 20: mod_base = gm
  modified_base 21: mod_base = OTHER; note = 2'O-methyl-adenosine
  misc_feature 1^2: note = phosphorothioate linkage
  misc_feature 2^3: note = phosphorothioate linkage
ttttgccttcatccacaagga

SEQ ID NO: 574 - RNA, 21 nt, synthetic construct
  source 1..21: mol_type = other RNA
  misc_feature 1..21: note = Description: ZPI siRNA sense strand: ETXS655; corresponding to SEQ ID NO: 254
  modified_base 1: mod_base = cm
  modified_base 2: mod_base = gm
  modified_base 3: mod_base = OTHER; note = 2'O-methyl-adenosine
  modified_base 4: mod_base = OTHER; note = 2'O-methyl-adenosine
  modified_base 5: mod_base = OTHER; note = 2'O-methyl-adenosine
  modified_base 6: mod_base = gm
  modified_base 7: mod_base = OTHER; note = Af
  modified_base 8: mod_base = um
  modified_base 9: mod_base = OTHER; note = 2' Fluoro-cytidine
  modified_base 10: mod_base = OTHER; note = 2' Fluoro-uridine
  modified_base 11: mod_base = OTHER; note = 2' Fluoro-cytidine
  modified_base 12: mod_base = cm
  modified_base 13: mod_base = OTHER; note = 2'O-methyl-adenosine
  modified_base 14: mod_base = um
  modified_base 15: mod_base = gm
  modified_base 16: mod_base = OTHER; note = 2'O-methyl-adenosine
  modified_base 17: mod_base = gm
  modified_base 18: mod_base = gm
  modified_base 19: mod_base = cm
  modified_base 20: mod_base = OTHER; note = 2'O-methyl-adenosine
  modified_base 21: mod_base = cm
  misc_feature 1^2: note = phosphorothioate linkage
  misc_feature 2^3: note = phosphorothioate linkage
cgaaagatctccatgaggcac

SEQ ID NO: 575 - RNA, 21 nt, synthetic construct
  source 1..21: mol_type = other RNA
  misc_feature 1..21: note = Description: ZPI siRNA sense strand: ETXS657; corresponding to SEQ ID NO: 255
  modified_base 1: mod_base = um
  modified_base 2: mod_base = gm
  modified_base 3: mod_base = cm
  modified_base 4: mod_base = um
  modified_base 5: mod_base = gm
  modified_base 6: mod_base = gm
  modified_base 7: mod_base = OTHER; note = 2' Fluoro-uridine
  modified_base 8: mod_base = gm
  modified_base 9: mod_base = OTHER; note = 2' Fluoro-guanosine
  modified_base 10: mod_base = OTHER; note = 2' Fluoro-uridine
  modified_base 11: mod_base = OTHER; note = 2' Fluoro-cytidine
  modified_base 12: mod_base = cm
  modified_base 13: mod_base = um
  modified_base 14: mod_base = cm
  modified_base 15: mod_base = OTHER; note = 2'O-methyl-adenosine
  modified_base 16: mod_base = um
  modified_base 17: mod_base = gm
  modified_base 18: mod_base = gm
  modified_base 19: mod_base = OTHER; note = 2'O-methyl-adenosine
  modified_base 20: mod_base = gm
  modified_base 21: mod_base = OTHER; note = 2'O-methyl-adenosine
  misc_feature 1^2: note = phosphorothioate linkage
  misc_feature 2^3: note = phosphorothioate linkage
tgctggtggtcctcatggaga

SEQ ID NO: 576 - RNA, 21 nt, synthetic construct
  source 1..21: mol_type = other RNA
  misc_feature 1..21: note = Description: ZPI siRNA sense strand: ETXS659; corresponding to SEQ ID NO: 256
  modified_base 1: mod_base = cm
  modified_base 2: mod_base = cm
  modified_base 3: mod_base = um
  modified_base 4: mod_base = um
  modified_base 5: mod_base = cm
  modified_base 6: mod_base = OTHER; note = 2'O-methyl-adenosine
  modified_base 7: mod_base = OTHER; note = 2' Fluoro-uridine
  modified_base 8: mod_base = cm
  modified_base 9: mod_base = OTHER; note = 2' Fluoro-cytidine
  modified_base 10: mod_base = OTHER; note = Af
  modified_base 11: mod_base = OTHER; note = 2' Fluoro-cytidine
  modified_base 12: mod_base = OTHER; note = 2'O-methyl-adenosine
  modified_base 13: mod_base = OTHER; note = 2'O-methyl-adenosine
  modified_base 14: mod_base = gm
  modified_base 15: mod_base = gm
  modified_base 16: mod_base = OTHER; note = 2'O-methyl-adenosine
  modified_base 17: mod_base = um
  modified_base 18: mod_base = um
  modified_base 19: mod_base = um
  modified_base 20: mod_base = um
  modified_base 21: mod_base = gm
  misc_feature 1^2: note = phosphorothioate linkage
  misc_feature 2^3: note = phosphorothioate linkage
ccttcatccacaaggattttg

SEQ ID NO: 577 - RNA, 21 nt, synthetic construct
  source 1..21: mol_type = other RNA
  misc_feature 1..21: note = Description: ZPI siRNA sense strand: ETXS661; corresponding to SEQ ID NO: 257
  modified_base 1: mod_base = gm
  modified_base 2: mod_base = OTHER; note = 2'O-methyl-adenosine
  modified_base 3: mod_base = OTHER; note = 2'O-methyl-adenosine
  modified_base 4: mod_base = OTHER; note = 2'O-methyl-adenosine
  modified_base 5: mod_base = gm
  modified_base 6: mod_base = OTHER; note = 2'O-methyl-adenosine
  modified_base 7: mod_base = OTHER; note = 2' Fluoro-uridine
  modified_base 8: mod_base = cm
  modified_base 9: mod_base = OTHER; note = 2' Fluoro-uridine
  modified_base 10: mod_base = OTHER; note = 2' Fluoro-cytidine
  modified_base 11: mod_base = OTHER; note = 2' Fluoro-cytidine
  modified_base 12: mod_base = OTHER; note = 2'O-methyl-adenosine
  modified_base 13: mod_base = um
  modified_base 14: mod_base = gm
  modified_base 15: mod_base = OTHER; note = 2'O-methyl-adenosine
  modified_base 16: mod_base = gm
  modified_base 17: mod_base = gm
  modified_base 18: mod_base = cm
  modified_base 19: mod_base = OTHER; note = 2'O-methyl-adenosine
  modified_base 20: mod_base = cm
  modified_base 21: mod_base = gm
  misc_feature 1^2: note = phosphorothioate linkage
  misc_feature 2^3: note = phosphorothioate linkage
gaaagatctccatgaggcacg

SEQ ID NO: 578 - RNA, 21 nt, synthetic construct
  source 1..21: mol_type = other RNA
  misc_feature 1..21: note = Description: ZPI siRNA sense strand: ETXS663; corresponding to SEQ ID NO: 258
  modified_base 1: mod_base = um
  modified_base 2: mod_base = um
  modified_base 3: mod_base = cm
  modified_base 4: mod_base = OTHER; note = 2'O-methyl-adenosine
  modified_base 5: mod_base = um
  modified_base 6: mod_base = cm
  modified_base 7: mod_base = OTHER; note = 2' Fluoro-cytidine
  modified_base 8: mod_base = OTHER; note = 2'O-methyl-adenosine
  modified_base 9: mod_base = OTHER; note = 2' Fluoro-cytidine
  modified_base 10: mod_base = OTHER; note = Af
  modified_base 11: mod_base = OTHER; note = Af
  modified_base 12: mod_base = gm
  modified_base 13: mod_base = gm
  modified_base 14: mod_base = OTHER; note = 2'O-methyl-adenosine
  modified_base 15: mod_base = um
  modified_base 16: mod_base = um
  modified_base 17: mod_base = um
  modified_base 18: mod_base = um
  modified_base 19: mod_base = gm
  modified_base 20: mod_base = OTHER; note = 2'O-methyl-adenosine
  modified_base 21: mod_base = um
  misc_feature 1^2: note = phosphorothioate linkage
  misc_feature 2^3: note = phosphorothioate linkage
ttcatccacaaggattttgat

SEQ ID NO: 579 - RNA, 21 nt, synthetic construct
  source 1..21: mol_type = other RNA
  misc_feature 1..21: note = Description: ZPI siRNA sense strand: ETXS665; corresponding to SEQ ID NO: 259
  modified_base 1: mod_base = um
  modified_base 2: mod_base = um
  modified_base 3: mod_base = um
  modified_base 4: mod_base = gm
  modified_base 5: mod_base = OTHER; note = 2'O-methyl-adenosine
  modified_base 6: mod_base = um
  modified_base 7: mod_base = OTHER; note = 2' Fluoro-guanosine
  modified_base 8: mod_base = OTHER; note = 2'O-methyl-adenosine
  modified_base 9: mod_base = OTHER; note = 2' Fluoro-guanosine
  modified_base 10: mod_base = OTHER; note = Af
  modified_base 11: mod_base = OTHER; note = 2' Fluoro-uridine
  modified_base 12: mod_base = um
  modified_base 13: mod_base = OTHER; note = 2'O-methyl-adenosine
  modified_base 14: mod_base = OTHER; note = 2'O-methyl-adenosine
  modified_base 15: mod_base = um
  modified_base 16: mod_base = cm
  modified_base 17: mod_base = cm
  modified_base 18: mod_base = um
  modified_base 19: mod_base = gm
  modified_base 20: mod_base = OTHER; note = 2'O-methyl-adenosine
  modified_base 21: mod_base = OTHER; note = 2'O-methyl-adenosine
  misc_feature 1^2: note = phosphorothioate linkage
  misc_feature 2^3: note = phosphorothioate linkage
tttgatgagattaatcctgaa

SEQ ID NO: 580 - RNA, 21 nt, synthetic construct
  source 1..21: mol_type = other RNA
  misc_feature 1..21: note = Description: ZPI siRNA sense strand: ETXS667; corresponding to SEQ ID NO: 260
  modified_base 1: mod_base = um
  modified_base 2: mod_base = um
  modified_base 3: mod_base = gm
  modified_base 4: mod_base = cm
  modified_base 5: mod_base = cm
  modified_base 6: mod_base = um
  modified_base 7: mod_base = OTHER; note = 2' Fluoro-uridine
  modified_base 8: mod_base = cm
  modified_base 9: mod_base = OTHER; note = Af
  modified_base 10: mod_base = OTHER; note = 2' Fluoro-uridine
  modified_base 11: mod_base = OTHER; note = 2' Fluoro-cytidine
  modified_base 12: mod_base = cm
  modified_base 13: mod_base = OTHER; note = 2'O-methyl-adenosine
  modified_base 14: mod_base = cm
  modified_base 15: mod_base = OTHER; note = 2'O-methyl-adenosine
  modified_base 16: mod_base = OTHER; note = 2'O-methyl-adenosine
  modified_base 17: mod_base = gm
  modified_base 18: mod_base = gm
  modified_base 19: mod_base = OTHER; note = 2'O-methyl-adenosine
  modified_base 20: mod_base = um
  modified_base 21: mod_base = um
  misc_feature 1^2: note = phosphorothioate linkage
  misc_feature 2^3: note = phosphorothioate linkage
ttgccttcatccacaaggatt

SEQ ID NO: 581 - RNA, 21 nt, synthetic construct
  source 1..21: mol_type = other RNA
  misc_feature 1..21: note = Description: ZPI siRNA sense strand: ETXS669; corresponding to SEQ ID NO: 261
  modified_base 1: mod_base = gm
  modified_base 2: mod_base = OTHER; note = 2'O-methyl-adenosine
  modified_base 3: mod_base = um
  modified_base 4: mod_base = cm
  modified_base 5: mod_base = um
  modified_base 6: mod_base = cm
  modified_base 7: mod_base = OTHER; note = 2' Fluoro-cytidine
  modified_base 8: mod_base = OTHER; note = 2'O-methyl-adenosine
  modified_base 9: mod_base = OTHER; note = 2' Fluoro-uridine
  modified_base 10: mod_base = OTHER; note = 2' Fluoro-guanosine
  modified_base 11: mod_base = OTHER; note = Af
  modified_base 12: mod_base = gm
  modified_base 13: mod_base = gm
  modified_base 14: mod_base = cm
  modified_base 15: mod_base = OTHER; note = 2'O-methyl-adenosine
  modified_base 16: mod_base = cm
  modified_base 17: mod_base = gm
  modified_base 18: mod_base = OTHER; note = 2'O-methyl-adenosine
  modified_base 19: mod_base = um
  modified_base 20: mod_base = gm
  modified_base 21: mod_base = gm
  misc_feature 1^2: note = phosphorothioate linkage
  misc_feature 2^3: note = phosphorothioate linkage
gatctccatgaggcacgatgg

SEQ ID NO: 582 - RNA, 21 nt, synthetic construct
  source 1..21: mol_type = other RNA
  misc_feature 1..21: note = Description: ZPI siRNA sense strand: ETXS671; corresponding to SEQ ID NO: 262
  modified_base 1: mod_base = cm
  modified_base 2: mod_base = OTHER; note = 2'O-methyl-adenosine
  modified_base 3: mod_base = um
  modified_base 4: mod_base = gm
  modified_base 5: mod_base = cm
  modified_base 6: mod_base = um
  modified_base 7: mod_base = OTHER; note = 2' Fluoro-guanosine
  modified_base 8: mod_base = gm
  modified_base 9: mod_base = OTHER; note = 2' Fluoro-uridine
  modified_base 10: mod_base = OTHER; note = 2' Fluoro-guanosine
  modified_base 11: mod_base = OTHER; note = 2' Fluoro-guanosine
  modified_base 12: mod_base = um
  modified_base 13: mod_base = cm
  modified_base 14: mod_base = cm
  modified_base 15: mod_base = um
  modified_base 16: mod_base = cm
  modified_base 17: mod_base = OTHER; note = 2'O-methyl-adenosine
  modified_base 18: mod_base = um
  modified_base 19: mod_base = gm
  modified_base 20: mod_base = gm
  modified_base 21: mod_base = OTHER; note = 2'O-methyl-adenosine
  misc_feature 1^2: note = phosphorothioate linkage
  misc_feature 2^3: note = phosphorothioate linkage
catgctggtggtcctcatgga

SEQ ID NO: 583 - RNA, 21 nt, synthetic construct
  source 1..21: mol_type = other RNA
  misc_feature 1..21: note = Description: ZPI siRNA sense strand: ETXS673; corresponding to SEQ ID NO: 263
  modified_base 1: mod_base = um
  modified_base 2: mod_base = um
  modified_base 3: mod_base = um
  modified_base 4: mod_base = gm
  modified_base 5: mod_base = cm
  modified_base 6: mod_base = cm
  modified_base 7: mod_base = OTHER; note = 2' Fluoro-uridine
  modified_base 8: mod_base = um
  modified_base 9: mod_base = OTHER; note = 2' Fluoro-cytidine
  modified_base 10: mod_base = OTHER; note = Af
  modified_base 11: mod_base = OTHER; note = 2' Fluoro-uridine
  modified_base 12: mod_base = cm
  modified_base 13: mod_base = cm
  modified_base 14: mod_base = OTHER; note = 2'O-methyl-adenosine
  modified_base 15: mod_base = cm
  modified_base 16: mod_base = OTHER; note = 2'O-methyl-adenosine
  modified_base 17: mod_base = OTHER; note = 2'O-methyl-adenosine
  modified_base 18: mod_base = gm
  modified_base 19: mod_base = gm
  modified_base 20: mod_base = OTHER; note = 2'O-methyl-adenosine
  modified_base 21: mod_base = um
  misc_feature 1^2: note = phosphorothioate linkage
  misc_feature 2^3: note = phosphorothioate linkage
tttgccttcatccacaaggat

SEQ ID NO: 584 - RNA, 21 nt, synthetic construct
  source 1..21: mol_type = other RNA
  misc_feature 1..21: note = Description: ZPI siRNA sense strand: ETXS675; corresponding to SEQ ID NO: 264
  modified_base 1: mod_base = gm
  modified_base 2: mod_base = cm
  modified_base 3: mod_base = cm
  modified_base 4: mod_base = um
  modified_base 5: mod_base = um
  modified_base 6: mod_base = cm
  modified_base 7: mod_base = OTHER; note = Af
  modified_base 8: mod_base = um
  modified_base 9: mod_base = OTHER; note = 2' Fluoro-cytidine
  modified_base 10: mod_base = OTHER; note = 2' Fluoro-cytidine
  modified_base 11: mod_base = OTHER; note = Af
  modified_base 12: mod_base = cm
  modified_base 13: mod_base = OTHER; note = 2'O-methyl-adenosine
  modified_base 14: mod_base = OTHER; note = 2'O-methyl-adenosine
  modified_base 15: mod_base = gm
  modified_base 16: mod_base = gm
  modified_base 17: mod_base = OTHER; note = 2'O-methyl-adenosine
  modified_base 18: mod_base = um
  modified_base 19: mod_base = um
  modified_base 20: mod_base = um
  modified_base 21: mod_base = um
  misc_feature 1^2: note = phosphorothioate linkage
  misc_feature 2^3: note = phosphorothioate linkage
gccttcatccacaaggatttt

SEQ ID NO: 585 - RNA, 21 nt, synthetic construct
  source 1..21: mol_type = other RNA
  misc_feature 1..21: note = Description: ZPI siRNA sense strand: ETXS677; corresponding to SEQ ID NO: 265
  modified_base 1: mod_base = um
  modified_base 2: mod_base = OTHER; note = 2'O-methyl-adenosine
  modified_base 3: mod_base = cm
  modified_base 4: mod_base = cm
  modified_base 5: mod_base = OTHER; note = 2'O-methyl-adenosine
  modified_base 6: mod_base = OTHER; note = 2'O-methyl-adenosine
  modified_base 7: mod_base = OTHER; note = 2' Fluoro-guanosine
  modified_base 8: mod_base = gm
  modified_base 9: mod_base = OTHER; note = Af
  modified_base 10: mod_base = OTHER; note = Af
  modified_base 11: mod_base = OTHER; note = Af
  modified_base 12: mod_base = um
  modified_base 13: mod_base = gm
  modified_base 14: mod_base = cm
  modified_base 15: mod_base = cm
  modified_base 16: mod_base = OTHER; note = 2'O-methyl-adenosine
  modified_base 17: mod_base = cm
  modified_base 18: mod_base = cm
  modified_base 19: mod_base = OTHER; note = 2'O-methyl-adenosine
  modified_base 20: mod_base = um
  modified_base 21: mod_base = gm
  misc_feature 1^2: note = phosphorothioate linkage
  misc_feature 2^3: note = phosphorothioate linkage
taccaaggaaatgccaccatg

SEQ ID NO: 586 - RNA, 21 nt, synthetic construct
  source 1..21: mol_type = other RNA
  misc_feature 1..21: note = Description: ZPI siRNA sense strand: ETXS679; corresponding to SEQ ID NO: 266
  modified_base 1: mod_base = um
  modified_base 2: mod_base = um
  modified_base 3: mod_base = gm
  modified_base 4: mod_base = OTHER; note = 2'O-methyl-adenosine
  modified_base 5: mod_base = um
  modified_base 6: mod_base = gm
  modified_base 7: mod_base = OTHER; note = Af
  modified_base 8: mod_base = gm
  modified_base 9: mod_base = OTHER; note = Af
  modified_base 10: mod_base = OTHER; note = 2' Fluoro-uridine
  modified_base 11: mod_base = OTHER; note = 2' Fluoro-uridine
  modified_base 12: mod_base = OTHER; note = 2'O-methyl-adenosine
  modified_base 13: mod_base = OTHER; note = 2'O-methyl-adenosine
  modified_base 14: mod_base = um
  modified_base 15: mod_base = cm
  modified_base 16: mod_base = cm
  modified_base 17: mod_base = um
  modified_base 18: mod_base = gm
  modified_base 19: mod_base = OTHER; note = 2'O-methyl-adenosine
  modified_base 20: mod_base = OTHER; note = 2'O-methyl-adenosine
  modified_base 21: mod_base = OTHER; note = 2'O-methyl-adenosine
  misc_feature 1^2: note = phosphorothioate linkage
  misc_feature 2^3: note = phosphorothioate linkage
ttgatgagattaatcctgaaa

SEQ ID NO: 587 - RNA, 21 nt, synthetic construct
  source 1..21: mol_type = other RNA
  misc_feature 1..21: note = Description: ZPI siRNA sense strand: ETXS681; corresponding to SEQ ID NO: 267
  modified_base 1: mod_base = cm
  modified_base 2: mod_base = um
  modified_base 3: mod_base = um
  modified_base 4: mod_base = cm
  modified_base 5: mod_base = OTHER; note = 2'O-methyl-adenosine
  modified_base 6: mod_base = um
  modified_base 7: mod_base = OTHER; note = 2' Fluoro-cytidine
  modified_base 8: mod_base = cm
  modified_base 9: mod_base = OTHER; note = Af
  modified_base 10: mod_base = OTHER; note = 2' Fluoro-cytidine
  modified_base 11: mod_base = OTHER; note = Af
  modified_base 12: mod_base = OTHER; note = 2'O-methyl-adenosine
  modified_base 13: mod_base = gm
  modified_base 14: mod_base = gm
  modified_base 15: mod_base = OTHER; note = 2'O-methyl-adenosine
  modified_base 16: mod_base = um
  modified_base 17: mod_base = um
  modified_base 18: mod_base = um
  modified_base 19: mod_base = um
  modified_base 20: mod_base = gm
  modified_base 21: mod_base = OTHER; note = 2'O-methyl-adenosine
  misc_feature 1^2: note = phosphorothioate linkage
  misc_feature 2^3: note = phosphorothioate linkage
cttcatccacaaggattttga

SEQ ID NO: 588 - RNA, 21 nt, synthetic construct
  source 1..21: mol_type = other RNA
  misc_feature 1..21: note = Description: ZPI siRNA sense strand: ETXS683; corresponding to SEQ ID NO: 268
  modified_base 1: mod_base = OTHER; note = 2'O-methyl-adenosine
  modified_base 2: mod_base = OTHER; note = 2'O-methyl-adenosine
  modified_base 3: mod_base = OTHER; note = 2'O-methyl-adenosine
  modified_base 4: mod_base = gm
  modified_base 5: mod_base = OTHER; note = 2'O-methyl-adenosine
  modified_base 6: mod_base = um
  modified_base 7: mod_base = OTHER; note = 2' Fluoro-cytidine
  modified_base 8: mod_base = um
  modified_base 9: mod_base = OTHER; note = 2' Fluoro-cytidine
  modified_base 10: mod_base = OTHER; note = 2' Fluoro-cytidine
  modified_base 11: mod_base = OTHER; note = Af
  modified_base 12: mod_base = um
  modified_base 13: mod_base = gm
  modified_base 14: mod_base = OTHER; note = 2'O-methyl-adenosine
  modified_base 15: mod_base = gm
  modified_base 16: mod_base = gm
  modified_base 17: mod_base = cm
  modified_base 18: mod_base = OTHER; note = 2'O-methyl-adenosine
  modified_base 19: mod_base = cm
  modified_base 20: mod_base = gm
  modified_base 21: mod_base = OTHER; note = 2'O-methyl-adenosine
  misc_feature 1^2: note = phosphorothioate linkage
  misc_feature 2^3: note = phosphorothioate linkage
aaagatctccatgaggcacga

SEQ ID NO: 589 - RNA, 21 nt, synthetic construct
  source 1..21: mol_type = other RNA
  misc_feature 1..21: note = Description: ZPI siRNA sense strand: ETXS685; corresponding to SEQ ID NO: 269
  modified_base 1: mod_base = um
  modified_base 2: mod_base = gm
  modified_base 3: mod_base = um
  modified_base 4: mod_base = um
  modified_base 5: mod_base = um
  modified_base 6: mod_base = gm
  modified_base 7: mod_base = OTHER; note = Af
  modified_base 8: mod_base = um
  modified_base 9: mod_base = OTHER; note = 2' Fluoro-guanosine
  modified_base 10: mod_base = OTHER; note = Af
  modified_base 11: mod_base = OTHER; note = 2' Fluoro-guanosine
  modified_base 12: mod_base = OTHER; note = 2'O-methyl-adenosine
  modified_base 13: mod_base = um
  modified_base 14: mod_base = um
  modified_base 15: mod_base = OTHER; note = 2'O-methyl-adenosine
  modified_base 16: mod_base = OTHER; note = 2'O-methyl-adenosine
  modified_base 17: mod_base = um
  modified_base 18: mod_base = cm
  modified_base 19: mod_base = cm
  modified_base 20: mod_base = um
  modified_base 21: mod_base = gm
  misc_feature 1^2: note = phosphorothioate linkage
  misc_feature 2^3: note = phosphorothioate linkage
tgtttgatgagattaatcctg

SEQ ID NO: 590 - RNA, 21 nt, synthetic construct
  source 1..21: mol_type = other RNA
  misc_feature 1..21: note = Description: ZPI siRNA sense strand: ETXS687; corresponding to SEQ ID NO: 270
  modified_base 1: mod_base = OTHER; note = 2'O-methyl-adenosine
  modified_base 2: mod_base = um
  modified_base 3: mod_base = gm
  modified_base 4: mod_base = cm
  modified_base 5: mod_base = um
  modified_base 6: mod_base = gm
  modified_base 7: mod_base = OTHER; note = 2' Fluoro-guanosine
  modified_base 8: mod_base = um
  modified_base 9: mod_base = OTHER; note = 2' Fluoro-guanosine
  modified_base 10: mod_base = OTHER; note = 2' Fluoro-guanosine
  modified_base 11: mod_base = OTHER; note = 2' Fluoro-uridine
  modified_base 12: mod_base = cm
  modified_base 13: mod_base = cm
  modified_base 14: mod_base = um
  modified_base 15: mod_base = cm
  modified_base 16: mod_base = OTHER; note = 2'O-methyl-adenosine
  modified_base 17: mod_base = um
  modified_base 18: mod_base = gm
  modified_base 19: mod_base = gm
  modified_base 20: mod_base = OTHER; note = 2'O-methyl-adenosine
  modified_base 21: mod_base = gm
  misc_feature 1^2: note = phosphorothioate linkage
  misc_feature 2^3: note = phosphorothioate linkage
atgctggtggtcctcatggag

SEQ ID NO: 591 - RNA, 21 nt, synthetic construct
  source 1..21: mol_type = other RNA
  misc_feature 1..21: note = Description: ZPI siRNA sense strand: ETXS689; corresponding to SEQ ID NO: 271
  modified_base 1: mod_base = gm
  modified_base 2: mod_base = um
  modified_base 3: mod_base = um
  modified_base 4: mod_base = um
  modified_base 5: mod_base = um
  modified_base 6: mod_base = gm
  modified_base 7: mod_base = OTHER; note = 2' Fluoro-cytidine
  modified_base 8: mod_base = cm
  modified_base 9: mod_base = OTHER; note = 2' Fluoro-uridine
  modified_base 10: mod_base = OTHER; note = 2' Fluoro-uridine
  modified_base 11: mod_base = OTHER; note = 2' Fluoro-cytidine
  modified_base 12: mod_base = OTHER; note = 2'O-methyl-adenosine
  modified_base 13: mod_base = um
  modified_base 14: mod_base = cm
  modified_base 15: mod_base = cm
  modified_base 16: mod_base = OTHER; note = 2'O-methyl-adenosine
  modified_base 17: mod_base = cm
  modified_base 18: mod_base = OTHER; note = 2'O-methyl-adenosine
  modified_base 19: mod_base = OTHER; note = 2'O-methyl-adenosine
  modified_base 20: mod_base = gm
  modified_base 21: mod_base = gm
  misc_feature 1^2: note = phosphorothioate linkage
  misc_feature 2^3: note = phosphorothioate linkage
gttttgccttcatccacaagg

SEQ ID NO: 592 - RNA, 21 nt, synthetic construct
  source 1..21: mol_type = other RNA
  misc_feature 1..21: note = Description: ZPI siRNA sense strand: ETXS691; corresponding to SEQ ID NO: 272
  modified_base 1: mod_base = cm
  modified_base 2: mod_base = cm
  modified_base 3: mod_base = OTHER; note = 2'O-methyl-adenosine
  modified_base 4: mod_base = cm
  modified_base 5: mod_base = cm
  modified_base 6: mod_base = OTHER; note = 2'O-methyl-adenosine
  modified_base 7: mod_base = OTHER; note = 2' Fluoro-uridine
  modified_base 8: mod_base = gm
  modified_base 9: mod_base = OTHER; note = 2' Fluoro-cytidine
  modified_base 10: mod_base = OTHER; note = 2' Fluoro-uridine
  modified_base 11: mod_base = OTHER; note = 2' Fluoro-guanosine
  modified_base 12: mod_base = gm
  modified_base 13: mod_base = um
  modified_base 14: mod_base = gm
  modified_base 15: mod_base = gm
  modified_base 16: mod_base = um
  modified_base 17: mod_base = cm
  modified_base 18: mod_base = cm
  modified_base 19: mod_base = um
  modified_base 20: mod_base = cm
  modified_base 21: mod_base = OTHER; note = 2'O-methyl-adenosine
  misc_feature 1^2: note = phosphorothioate linkage
  misc_feature 2^3: note = phosphorothioate linkage
ccaccatgctggtggtcctca

SEQ ID NO: 593 - RNA, 21 nt, synthetic construct
  source 1..21: mol_type = other RNA
  misc_feature 1..21: note = Description: ZPI siRNA sense strand: ETXS693; corresponding to SEQ ID NO: 273
  modified_base 1: mod_base = cm
  modified_base 2: mod_base = OTHER; note = 2'O-methyl-adenosine
  modified_base 3: mod_base = cm
  modified_base 4: mod_base = cm
  modified_base 5: mod_base = OTHER; note = 2'O-methyl-adenosine
  modified_base 6: mod_base = um
  modified_base 7: mod_base = OTHER; note = 2' Fluoro-guanosine
  modified_base 8: mod_base = cm
  modified_base 9: mod_base = OTHER; note = 2' Fluoro-uridine
  modified_base 10: mod_base = OTHER; note = 2' Fluoro-guanosine
  modified_base 11: mod_base = OTHER; note = 2' Fluoro-guanosine
  modified_base 12: mod_base = um
  modified_base 13: mod_base = gm
  modified_base 14: mod_base = gm
  modified_base 15: mod_base = um
  modified_base 16: mod_base = cm
  modified_base 17: mod_base = cm
  modified_base 18: mod_base = um
  modified_base 19: mod_base = cm
  modified_base 20: mod_base = OTHER; note = 2'O-methyl-adenosine
  modified_base 21: mod_base = um
  misc_feature 1^2: note = phosphorothioate linkage
  misc_feature 2^3: note = phosphorothioate linkage
caccatgctggtggtcctcat

SEQ ID NO: 594 - RNA, 21 nt, synthetic construct
  source 1..21: mol_type = other RNA
  misc_feature 1..21: note = Description: ZPI siRNA sense strand: ETXS695; corresponding to SEQ ID NO: 274
  modified_base 1: mod_base = OTHER; note = 2'O-methyl-adenosine
  modified_base 2: mod_base = OTHER; note = 2'O-methyl-adenosine
  modified_base 3: mod_base = gm
  modified_base 4: mod_base = OTHER; note = 2'O-methyl-adenosine
  modified_base 5: mod_base = um
  modified_base 6: mod_base = cm
  modified_base 7: mod_base = OTHER; note = 2' Fluoro-uridine
  modified_base 8: mod_base = cm
  modified_base 9: mod_base = OTHER; note = 2' Fluoro-cytidine
  modified_base 10: mod_base = OTHER; note = Af
  modified_base 11: mod_base = OTHER; note = 2' Fluoro-uridine
  modified_base 12: mod_base = gm
  modified_base 13: mod_base = OTHER; note = 2'O-methyl-adenosine
  modified_base 14: mod_base = gm
  modified_base 15: mod_base = gm
  modified_base 16: mod_base = cm
  modified_base 17: mod_base = OTHER; note = 2'O-methyl-adenosine
  modified_base 18: mod_base = cm
  modified_base 19: mod_base = gm
  modified_base 20: mod_base = OTHER; note = 2'O-methyl-adenosine
  modified_base 21: mod_base = um
  misc_feature 1^2: note = phosphorothioate linkage
  misc_feature 2^3: note = phosphorothioate linkage
aagatctccatgaggcacgat

SEQ ID NO: 595 - RNA, 21 nt, synthetic construct
  source 1..21: mol_type = other RNA
  misc_feature 1..21: note = Description: ZPI siRNA sense strand: ETXS697; corresponding to SEQ ID NO: 275
  modified_base 1: mod_base = OTHER; note = 2'O-methyl-adenosine
  modified_base 2: mod_base = gm
  modified_base 3: mod_base = um
  modified_base 4: mod_base = um
  modified_base 5: mod_base = um
  modified_base 6: mod_base = um
  modified_base 7: mod_base = OTHER; note = 2' Fluoro-guanosine
  modified_base 8: mod_base = cm
  modified_base 9: mod_base = OTHER; note = 2' Fluoro-cytidine
  modified_base 10: mod_base = OTHER; note = 2' Fluoro-uridine
  modified_base 11: mod_base = OTHER; note = 2' Fluoro-uridine
  modified_base 12: mod_base = cm
  modified_base 13: mod_base = OTHER; note = 2'O-methyl-adenosine
  modified_base 14: mod_base = um
  modified_base 15: mod_base = cm
  modified_base 16: mod_base = cm
  modified_base 17: mod_base = OTHER; note = 2'O-methyl-adenosine
  modified_base 18: mod_base = cm
  modified_base 19: mod_base = OTHER; note = 2'O-methyl-adenosine
  modified_base 20: mod_base = OTHER; note = 2'O-methyl-adenosine
  modified_base 21: mod_base = gm
  misc_feature 1^2: note = phosphorothioate linkage
  misc_feature 2^3: note = phosphorothioate linkage
agttttgccttcatccacaag

SEQ ID NO: 596 - RNA, 21 nt, synthetic construct
  source 1..21: mol_type = other RNA
  misc_feature 1..21: note = Description: ZPI siRNA sense strand: ETXS699; corresponding to SEQ ID NO: 276
  modified_base 1: mod_base = OTHER; note = 2'O-methyl-adenosine
  modified_base 2: mod_base = cm
  modified_base 3: mod_base = cm
  modified_base 4: mod_base = OTHER; note = 2'O-methyl-adenosine
  modified_base 5: mod_base = um
  modified_base 6: mod_base = gm
  modified_base 7: mod_base = OTHER; note = 2' Fluoro-cytidine
  modified_base 8: mod_base = um
  modified_base 9: mod_base = OTHER; note = 2' Fluoro-guanosine
  modified_base 10: mod_base = OTHER; note = 2' Fluoro-guanosine
  modified_base 11: mod_base = OTHER; note = 2' Fluoro-uridine
  modified_base 12: mod_base = gm
  modified_base 13: mod_base = gm
  modified_base 14: mod_base = um
  modified_base 15: mod_base = cm
  modified_base 16: mod_base = cm
  modified_base 17: mod_base = um
  modified_base 18: mod_base = cm
  modified_base 19: mod_base = OTHER; note = 2'O-methyl-adenosine
  modified_base 20: mod_base = um
  modified_base 21: mod_base = gm
  misc_feature 1^2: note = phosphorothioate linkage
  misc_feature 2^3: note = phosphorothioate linkage
accatgctggtggtcctcatg

SEQ ID NO: 597 - RNA, 21 nt, synthetic construct
  source 1..21: mol_type = other RNA
  misc_feature 1..21: note = Description: ZPI siRNA sense strand: ETXS701; corresponding to SEQ ID NO: 277
  modified_base 1: mod_base = OTHER; note = 2'O-methyl-adenosine
  modified_base 2: mod_base = gm
  modified_base 3: mod_base = OTHER; note = 2'O-methyl-adenosine
  modified_base 4: mod_base = um
  modified_base 5: mod_base = cm
  modified_base 6: mod_base = um
  modified_base 7: mod_base = OTHER; note = 2' Fluoro-cytidine
  modified_base 8: mod_base = cm
  modified_base 9: mod_base = OTHER; note = Af
  modified_base 10: mod_base = OTHER; note = 2' Fluoro-uridine
  modified_base 11: mod_base = OTHER; note = 2' Fluoro-guanosine
  modified_base 12: mod_base = OTHER; note = 2'O-methyl-adenosine
  modified_base 13: mod_base = gm
  modified_base 14: mod_base = gm
  modified_base 15: mod_base = cm
  modified_base 16: mod_base = OTHER; note = 2'O-methyl-adenosine
  modified_base 17: mod_base = cm
  modified_base 18: mod_base = gm
  modified_base 19: mod_base = OTHER; note = 2'O-methyl-adenosine
  modified_base 20: mod_base = um
  modified_base 21: mod_base = gm
  misc_feature 1^2: note = phosphorothioate linkage
  misc_feature 2^3: note = phosphorothioate linkage
agatctccatgaggcacgatg

SEQ ID NO: 598 - RNA, 21 nt, synthetic construct
  source 1..21: mol_type = other RNA
  misc_feature 1..21: note = Description: ZPI siRNA sense strand: ETXS703; corresponding to SEQ ID NO: 278
  modified_base 1: mod_base = cm
  modified_base 2: mod_base = cm
  modified_base 3: mod_base = OTHER; note = 2'O-methyl-adenosine
  modified_base 4: mod_base = um
  modified_base 5: mod_base = gm
  modified_base 6: mod_base = cm
  modified_base 7: mod_base = OTHER; note = 2' Fluoro-uridine
  modified_base 8: mod_base = gm
  modified_base 9: mod_base = OTHER; note = 2' Fluoro-guanosine
  modified_base 10: mod_base = OTHER; note = 2' Fluoro-uridine
  modified_base 11: mod_base = OTHER; note = 2' Fluoro-guanosine
  modified_base 12: mod_base = gm
  modified_base 13: mod_base = um
  modified_base 14: mod_base = cm
  modified_base 15: mod_base = cm
  modified_base 16: mod_base = um
  modified_base 17: mod_base = cm
  modified_base 18: mod_base = OTHER; note = 2'O-methyl-adenosine
  modified_base 19: mod_base = um
  modified_base 20: mod_base = gm
  modified_base 21: mod_base = gm
  misc_feature 1^2: note = phosphorothioate linkage
  misc_feature 2^3: note = phosphorothioate linkage
ccatgctggtggtcctcatgg

SEQ ID NO: 599 - RNA, 21 nt, synthetic construct
  source 1..21: mol_type = other RNA
  misc_feature 1..21: note = Description: ZPI siRNA sense strand: ETXS705; corresponding to SEQ ID NO: 279
  modified_base 1: mod_base = um
  modified_base 2: mod_base = gm
  modified_base 3: mod_base = cm
  modified_base 4: mod_base = cm
  modified_base 5: mod_base = um
  modified_base 6: mod_base = cm
  modified_base 7: mod_base = OTHER; note = 2' Fluoro-cytidine
  modified_base 8: mod_base = OTHER; note = 2'O-methyl-adenosine
  modified_base 9: mod_base = OTHER; note = 2' Fluoro-cytidine
  modified_base 10: mod_base = OTHER; note = 2' Fluoro-cytidine
  modified_base 11: mod_base = OTHER; note = 2' Fluoro-uridine
  modified_base 12: mod_base = um
  modified_base 13: mod_base = um
  modified_base 14: mod_base = gm
  modified_base 15: mod_base = OTHER; note = 2'O-methyl-adenosine
  modified_base 16: mod_base = cm
  modified_base 17: mod_base = OTHER; note = 2'O-methyl-adenosine
  modified_base 18: mod_base = OTHER; note = 2'O-methyl-adenosine
  modified_base 19: mod_base = gm
  modified_base 20: mod_base = OTHER; note = 2'O-methyl-adenosine
  modified_base 21: mod_base = OTHER; note = 2'O-methyl-adenosine
  misc_feature 1^2: note = phosphorothioate linkage
  misc_feature 2^3: note = phosphorothioate linkage
tgcctccacctttgacaagaa

SEQ ID NO: 600 - RNA, 21 nt, synthetic construct
  source 1..21: mol_type = other RNA
  misc_feature 1..21: note = Description: ZPI siRNA sense strand: ETXS707; corresponding to SEQ ID NO: 280
  modified_base 1: mod_base = cm
  modified_base 2: mod_base = cm
  modified_base 3: mod_base = um
  modified_base 4: mod_base = cm
  modified_base 5: mod_base = cm
  modified_base 6: mod_base = OTHER; note = 2'O-methyl-adenosine
  modified_base 7: mod_base = OTHER; note = 2' Fluoro-cytidine
  modified_base 8: mod_base = cm
  modified_base 9: mod_base = OTHER; note = 2' Fluoro-uridine
  modified_base 10: mod_base = OTHER; note = 2' Fluoro-uridine
  modified_base 11: mod_base = OTHER; note = 2' Fluoro-uridine
  modified_base 12: mod_base = gm
  modified_base 13: mod_base = OTHER; note = 2'O-methyl-adenosine
  modified_base 14: mod_base = cm
  modified_base 15: mod_base = OTHER; note = 2'O-methyl-adenosine
  modified_base 16: mod_base = OTHER; note = 2'O-methyl-adenosine
  modified_base 17: mod_base = gm
  modified_base 18: mod_base = OTHER; note = 2'O-methyl-adenosine
  modified_base 19: mod_base = OTHER; note = 2'O-methyl-adenosine
  modified_base 20: mod_base = um
  modified_base 21: mod_base = um
  misc_feature 1^2: note = phosphorothioate linkage
  misc_feature 2^3: note = phosphorothioate linkage
cctccacctttgacaagaatt

SEQ ID NO: 601 - RNA, 21 nt, synthetic construct
  source 1..21: mol_type = other RNA
  misc_feature 1..21: note = Description: ZPI siRNA sense strand: ETXS709; corresponding to SEQ ID NO: 281
  modified_base 1: mod_base = cm
  modified_base 2: mod_base = OTHER; note = 2'O-methyl-adenosine
  modified_base 3: mod_base = um
  modified_base 4: mod_base = um
  modified_base 5: mod_base = OTHER; note = 2'O-methyl-adenosine
  modified_base 6: mod_base = OTHER; note = 2'O-methyl-adenosine
  modified_base 7: mod_base = OTHER; note = 2' Fluoro-guanosine
  modified_base 8: mod_base = gm
  modified_base 9: mod_base = OTHER; note = 2' Fluoro-uridine
  modified_base 10: mod_base = OTHER; note = 2' Fluoro-guanosine
  modified_base 11: mod_base = OTHER; note = 2' Fluoro-cytidine
  modified_base 12: mod_base = cm
  modified_base 13: mod_base = cm
  modified_base 14: mod_base = OTHER; note = 2'O-methyl-adenosine
  modified_base 15: mod_base = um
  modified_base 16: mod_base = gm
  modified_base 17: mod_base = OTHER; note = 2'O-methyl-adenosine
  modified_base 18: mod_base = um
  modified_base 19: mod_base = gm
  modified_base 20: mod_base = um
  modified_base 21: mod_base = OTHER; note = 2'O-methyl-adenosine
  misc_feature 1^2: note = phosphorothioate linkage
  misc_feature 2^3: note = phosphorothioate linkage
cattaaggtgcccatgatgta

SEQ ID NO: 602 - RNA, 21 nt, synthetic construct
  source 1..21: mol_type = other RNA
  misc_feature 1..21: note = Description: ZPI siRNA sense strand: ETXS711; corresponding to SEQ ID NO: 282
  modified_base 1: mod_base = cm
  modified_base 2: mod_base = um
  modified_base 3: mod_base = gm
  modified_base 4: mod_base = cm
  modified_base 5: mod_base = cm
  modified_base 6: mod_base = cm
  modified_base 7: mod_base = OTHER; note = 2' Fluoro-uridine
  modified_base 8: mod_base = OTHER; note = 2'O-methyl-adenosine
  modified_base 9: mod_base = OTHER; note = 2' Fluoro-cytidine
  modified_base 10: mod_base = OTHER; note = 2' Fluoro-cytidine
  modified_base 11: mod_base = OTHER; note = Af
  modified_base 12: mod_base = OTHER; note = 2'O-methyl-adenosine
  modified_base 13: mod_base = gm
  modified_base 14: mod_base = gm
  modified_base 15: mod_base = OTHER; note = 2'O-methyl-adenosine
  modified_base 16: mod_base = OTHER; note = 2'O-methyl-adenosine
  modified_base 17: mod_base = OTHER; note = 2'O-methyl-adenosine
  modified_base 18: mod_base = um
  modified_base 19: mod_base = gm
  modified_base 20: mod_base = cm
  modified_base 21: mod_base = cm
  misc_feature 1^2: note = phosphorothioate linkage
  misc_feature 2^3: note = phosphorothioate linkage
ctgccctaccaaggaaatgcc

SEQ ID NO: 603 - RNA, 21 nt, synthetic construct
  source 1..21: mol_type = other RNA
  misc_feature 1..21: note = Description: ZPI siRNA sense strand: ETXS713; corresponding to SEQ ID NO: 283
  modified_base 1: mod_base = cm
  modified_base 2: mod_base = OTHER; note = 2'O-methyl-adenosine
  modified_base 3: mod_base = OTHER; note = 2'O-methyl-adenosine
  modified_base 4: mod_base = OTHER; note = 2'O-methyl-adenosine
  modified_base 5: mod_base = cm
  modified_base 6: mod_base = um
  modified_base 7: mod_base = OTHER; note = 2' Fluoro-guanosine
  modified_base 8: mod_base = cm
  modified_base 9: mod_base = OTHER; note = 2' Fluoro-cytidine
  modified_base 10: mod_base = OTHER; note = 2' Fluoro-cytidine
  modified_base 11: mod_base = OTHER; note = 2' Fluoro-uridine
  modified_base 12: mod_base = OTHER; note = 2'O-methyl-adenosine
  modified_base 13: mod_base = cm
  modified_base 14: mod_base = cm
  modified_base 15: mod_base = OTHER; note = 2'O-methyl-adenosine
  modified_base 16: mod_base = OTHER; note = 2'O-methyl-adenosine
  modified_base 17: mod_base = gm
  modified_base 18: mod_base = gm
  modified_base 19: mod_base = OTHER; note = 2'O-methyl-adenosine
  modified_base 20: mod_base = OTHER; note = 2'O-methyl-adenosine
  modified_base 21: mod_base = OTHER; note = 2'O-methyl-adenosine
  misc_feature 1^2: note = phosphorothioate linkage
  misc_feature 2^3: note = phosphorothioate linkage
caaactgccctaccaaggaaa

SEQ ID NO: 604 - RNA, 21 nt, synthetic construct
  source 1..21: mol_type = other RNA
  misc_feature 1..21: note = Description: ZPI siRNA sense strand: ETXS715; corresponding to SEQ ID NO: 284
  modified_base 1: mod_base = um
  modified_base 2: mod_base = cm
  modified_base 3: mod_base = OTHER; note = 2'O-methyl-adenosine
  modified_base 4: mod_base = OTHER; note = 2'O-methyl-adenosine
  modified_base 5: mod_base = OTHER; note = 2'O-methyl-adenosine
  modified_base 6: mod_base = cm
  modified_base 7: mod_base = OTHER; note = 2' Fluoro-uridine
  modified_base 8: mod_base = gm
  modified_base 9: mod_base = OTHER; note = 2' Fluoro-cytidine
  modified_base 10: mod_base = OTHER; note = 2' Fluoro-cytidine
  modified_base 11: mod_base = OTHER; note = 2' Fluoro-cytidine
  modified_base 12: mod_base = um
  modified_base 13: mod_base = OTHER; note = 2'O-methyl-adenosine
  modified_base 14: mod_base = cm
  modified_base 15: mod_base = cm
  modified_base 16: mod_base = OTHER; note = 2'O-methyl-adenosine
  modified_base 17: mod_base = OTHER; note = 2'O-methyl-adenosine
  modified_base 18: mod_base = gm
  modified_base 19: mod_base = gm
  modified_base 20: mod_base = OTHER; note = 2'O-methyl-adenosine
  modified_base 21: mod_base = OTHER; note = 2'O-methyl-adenosine
  misc_feature 1^2: note = phosphorothioate linkage
  misc_feature 2^3: note = phosphorothioate linkage
tcaaactgccctaccaaggaa

SEQ ID NO: 605 - RNA, 21 nt, synthetic construct
  source 1..21: mol_type = other RNA
  misc_feature 1..21: note = Description: ZPI siRNA sense strand: ETXS717; corresponding to SEQ ID NO: 285
  modified_base 1: mod_base = cm
  modified_base 2: mod_base = um
  modified_base 3: mod_base = cm
  modified_base 4: mod_base = cm
  modified_base 5: mod_base = OTHER; note = 2'O-methyl-adenosine
  modified_base 6: mod_base = cm
  modified_base 7: mod_base = OTHER; note = 2' Fluoro-cytidine
  modified_base 8: mod_base = um
  modified_base 9: mod_base = OTHER; note = 2' Fluoro-uridine
  modified_base 10: mod_base = OTHER; note = 2' Fluoro-uridine
  modified_base 11: mod_base = OTHER; note = 2' Fluoro-guanosine
  modified_base 12: mod_base = OTHER; note = 2'O-methyl-adenosine
  modified_base 13: mod_base = cm
  modified_base 14: mod_base = OTHER; note = 2'O-methyl-adenosine
  modified_base 15: mod_base = OTHER; note = 2'O-methyl-adenosine
  modified_base 16: mod_base = gm
  modified_base 17: mod_base = OTHER; note = 2'O-methyl-adenosine
  modified_base 18: mod_base = OTHER; note = 2'O-methyl-adenosine
  modified_base 19: mod_base = um
  modified_base 20: mod_base = um
  modified_base 21: mod_base = um
  misc_feature 1^2: note = phosphorothioate linkage
  misc_feature 2^3: note = phosphorothioate linkage
ctccacctttgacaagaattt

SEQ ID NO: 606 - RNA, 21 nt, synthetic construct
  source 1..21: mol_type = other RNA
  misc_feature 1..21: note = Description: ZPI siRNA sense strand: ETXS719; corresponding to SEQ ID NO: 286
  modified_base 1: mod_base = cm
  modified_base 2: mod_base = gm
  modified_base 3: mod_base = OTHER; note = 2'O-methyl-adenosine
  modified_base 4: mod_base = cm
  modified_base 5: mod_base = OTHER; note = 2'O-methyl-adenosine
  modified_base 6: mod_base = cm
  modified_base 7: mod_base = OTHER; note = 2' Fluoro-uridine
  modified_base 8: mod_base = um
  modified_base 9: mod_base = OTHER; note = 2' Fluoro-uridine
  modified_base 10: mod_base = OTHER; note = 2' Fluoro-cytidine
  modified_base 11: mod_base = OTHER; note = 2' Fluoro-cytidine
  modified_base 12: mod_base = OTHER; note = 2'O-methyl-adenosine
  modified_base 13: mod_base = cm
  modified_base 14: mod_base = cm
  modified_base 15: mod_base = um
  modified_base 16: mod_base = gm
  modified_base 17: mod_base = gm
  modified_base 18: mod_base = OTHER; note = 2'O-methyl-adenosine
  modified_base 19: mod_base = cm
  modified_base 20: mod_base = OTHER; note = 2'O-methyl-adenosine
  modified_base 21: mod_base = OTHER; note = 2'O-methyl-adenosine
  misc_feature 1^2: note = phosphorothioate linkage
  misc_feature 2^3: note = phosphorothioate linkage
cgacactttccacctggacaa

SEQ ID NO: 607 - RNA, 21 nt, synthetic construct
  source 1..21: mol_type = other RNA
  misc_feature 1..21: note = Description: ZPI siRNA sense strand: ETXS721; corresponding to SEQ ID NO: 287
  modified_base 1: mod_base = OTHER; note = 2'O-methyl-adenosine
  modified_base 2: mod_base = cm
  modified_base 3: mod_base = um
  modified_base 4: mod_base = um
  modified_base 5: mod_base = um
  modified_base 6: mod_base = cm
  modified_base 7: mod_base = OTHER; note = 2' Fluoro-cytidine
  modified_base 8: mod_base = OTHER; note = 2'O-methyl-adenosine
  modified_base 9: mod_base = OTHER; note = 2' Fluoro-cytidine
  modified_base 10: mod_base = OTHER; note = 2' Fluoro-cytidine
  modified_base 11: mod_base = OTHER; note = 2' Fluoro-uridine
  modified_base 12: mod_base = gm
  modified_base 13: mod_base = gm
  modified_base 14: mod_base = OTHER; note = 2'O-methyl-adenosine
  modified_base 15: mod_base = cm
  modified_base 16: mod_base = OTHER; note = 2'O-methyl-adenosine
  modified_base 17: mod_base = OTHER; note = 2'O-methyl-adenosine
  modified_base 18: mod_base = gm
  modified_base 19: mod_base = um
  modified_base 20: mod_base = OTHER; note = 2'O-methyl-adenosine
  modified_base 21: mod_base = cm
  misc_feature 1^2: note = phosphorothioate linkage
  misc_feature 2^3: note = phosphorothioate linkage
actttccacctggacaagtac

SEQ ID NO: 608 - RNA, 21 nt, synthetic construct
  source 1..21: mol_type = other RNA
  misc_feature 1..21: note = Description: ZPI siRNA sense strand: ETXS723; corresponding to SEQ ID NO: 288
  modified_base 1: mod_base = OTHER; note = 2'O-methyl-adenosine
  modified_base 2: mod_base = OTHER; note = 2'O-methyl-adenosine
  modified_base 3: mod_base = OTHER; note = 2'O-methyl-adenosine
  modified_base 4: mod_base = cm
  modified_base 5: mod_base = um
  modified_base 6: mod_base = gm
  modified_base 7: mod_base = OTHER; note = 2' Fluoro-cytidine
  modified_base 8: mod_base = cm
  modified_base 9: mod_base = OTHER; note = 2' Fluoro-cytidine
  modified_base 10: mod_base = OTHER; note = 2' Fluoro-uridine
  modified_base 11: mod_base = OTHER; note = Af
  modified_base 12: mod_base = cm
  modified_base 13: mod_base = cm
  modified_base 14: mod_base = OTHER; note = 2'O-methyl-adenosine
  modified_base 15: mod_base = OTHER; note = 2'O-methyl-adenosine
  modified_base 16: mod_base = gm
  modified_base 17: mod_base = gm
  modified_base 18: mod_base = OTHER; note = 2'O-methyl-adenosine
  modified_base 19: mod_base = OTHER; note = 2'O-methyl-adenosine
  modified_base 20: mod_base = OTHER; note = 2'O-methyl-adenosine
  modified_base 21: mod_base = um
  misc_feature 1^2: note = phosphorothioate linkage
  misc_feature 2^3: note = phosphorothioate linkage
aaactgccctaccaaggaaat

SEQ ID NO: 609 - RNA, 21 nt, synthetic construct
  source 1..21: mol_type = other RNA
  misc_feature 1..21: note = Description: ZPI siRNA sense strand: ETXS725; corresponding to SEQ ID NO: 289
  modified_base 1: mod_base = OTHER; note = 2'O-methyl-adenosine
  modified_base 2: mod_base = cm
  modified_base 3: mod_base = um
  modified_base 4: mod_base = gm
  modified_base 5: mod_base = cm
  modified_base 6: mod_base = cm
  modified_base 7: mod_base = OTHER; note = 2' Fluoro-cytidine
  modified_base 8: mod_base = um
  modified_base 9: mod_base = OTHER; note = Af
  modified_base 10: mod_base = OTHER; note = 2' Fluoro-cytidine
  modified_base 11: mod_base = OTHER; note = 2' Fluoro-cytidine
  modified_base 12: mod_base = OTHER; note = 2'O-methyl-adenosine
  modified_base 13: mod_base = OTHER; note = 2'O-methyl-adenosine
  modified_base 14: mod_base = gm
  modified_base 15: mod_base = gm
  modified_base 16: mod_base = OTHER; note = 2'O-methyl-adenosine
  modified_base 17: mod_base = OTHER; note = 2'O-methyl-adenosine
  modified_base 18: mod_base = OTHER; note = 2'O-methyl-adenosine
  modified_base 19: mod_base = um
  modified_base 20: mod_base = gm
  modified_base 21: mod_base = cm
  misc_feature 1^2: note = phosphorothioate linkage
  misc_feature 2^3: note = phosphorothioate linkage
actgccctaccaaggaaatgc

SEQ ID NO: 610 - RNA, 21 nt, synthetic construct
  source 1..21: mol_type = other RNA
  misc_feature 1..21: note = Description: ZPI siRNA sense strand: ETXS727; corresponding to SEQ ID NO: 290
  modified_base 1: mod_base = cm
  modified_base 2: mod_base = OTHER; note = 2'O-methyl-adenosine
  modified_base 3: mod_base = cm
  modified_base 4: mod_base = um
  modified_base 5: mod_base = um
  modified_base 6: mod_base = um
  modified_base 7: mod_base = OTHER; note = 2' Fluoro-cytidine
  modified_base 8: mod_base = cm
  modified_base 9: mod_base = OTHER; note = Af
  modified_base 10: mod_base = OTHER; note = 2' Fluoro-cytidine
  modified_base 11: mod_base = OTHER; note = 2' Fluoro-cytidine
  modified_base 12: mod_base = um
  modified_base 13: mod_base = gm
  modified_base 14: mod_base = gm
  modified_base 15: mod_base = OTHER; note = 2'O-methyl-adenosine
  modified_base 16: mod_base = cm
  modified_base 17: mod_base = OTHER; note = 2'O-methyl-adenosine
  modified_base 18: mod_base = OTHER; note = 2'O-methyl-adenosine
  modified_base 19: mod_base = gm
  modified_base 20: mod_base = um
  modified_base 21: mod_base = OTHER; note = 2'O-methyl-adenosine
  misc_feature 1^2: note = phosphorothioate linkage
  misc_feature 2^3: note = phosphorothioate linkage
cactttccacctggacaagta

SEQ ID NO: 611 - RNA, 21 nt, synthetic construct
  source 1..21: mol_type = other RNA
  misc_feature 1..21: note = Description: ZPI siRNA sense strand: ETXS729; corresponding to SEQ ID NO: 291
  modified_base 1: mod_base = cm
  modified_base 2: mod_base = cm
  modified_base 3: mod_base = OTHER; note = 2'O-methyl-adenosine
  modified_base 4: mod_base = um
  modified_base 5: mod_base = um
  modified_base 6: mod_base = OTHER; note = 2'O-methyl-adenosine
  modified_base 7: mod_base = OTHER; note = Af
  modified_base 8: mod_base = gm
  modified_base 9: mod_base = OTHER; note = 2' Fluoro-guanosine
  modified_base 10: mod_base = OTHER; note = 2' Fluoro-uridine
  modified_base 11: mod_base = OTHER; note = 2' Fluoro-guanosine
  modified_base 12: mod_base = cm
  modified_base 13: mod_base = cm
  modified_base 14: mod_base = cm
  modified_base 15: mod_base = OTHER; note = 2'O-methyl-adenosine
  modified_base 16: mod_base = um
  modified_base 17: mod_base = gm
  modified_base 18: mod_base = OTHER; note = 2'O-methyl-adenosine
  modified_base 19: mod_base = um
  modified_base 20: mod_base = gm
  modified_base 21: mod_base = um
  misc_feature 1^2: note = phosphorothioate linkage
  misc_feature 2^3: note = phosphorothioate linkage
ccattaaggtgcccatgatgt

SEQ ID NO: 612 - RNA, 21 nt, synthetic construct
  source 1..21: mol_type = other RNA
  misc_feature 1..21: note = Description: ZPI siRNA sense strand: ETXS731; corresponding to SEQ ID NO: 292
  modified_base 1: mod_base = um
  modified_base 2: mod_base = um
  modified_base 3: mod_base = gm
  modified_base 4: mod_base = cm
  modified_base 5: mod_base = cm
  modified_base 6: mod_base = um
  modified_base 7: mod_base = OTHER; note = 2' Fluoro-cytidine
  modified_base 8: mod_base = cm
  modified_base 9: mod_base = OTHER; note = Af
  modified_base 10: mod_base = OTHER; note = 2' Fluoro-cytidine
  modified_base 11: mod_base = OTHER; note = 2' Fluoro-cytidine
  modified_base 12: mod_base = um
  modified_base 13: mod_base = um
  modified_base 14: mod_base = um
  modified_base 15: mod_base = gm
  modified_base 16: mod_base = OTHER; note = 2'O-methyl-adenosine
  modified_base 17: mod_base = cm
  modified_base 18: mod_base = OTHER; note = 2'O-methyl-adenosine
  modified_base 19: mod_base = OTHER; note = 2'O-methyl-adenosine
  modified_base 20: mod_base = gm
  modified_base 21: mod_base = OTHER; note = 2'O-methyl-adenosine
  misc_feature 1^2: note = phosphorothioate linkage
  misc_feature 2^3: note = phosphorothioate linkage
ttgcctccacctttgacaaga

SEQ ID NO: 613 - RNA, 21 nt, synthetic construct
  source 1..21: mol_type = other RNA
  misc_feature 1..21: note = Description: ZPI siRNA sense strand: ETXS733; corresponding to SEQ ID NO: 293
  modified_base 1: mod_base = um
  modified_base 2: mod_base = um
  modified_base 3: mod_base = um
  modified_base 4: mod_base = cm
  modified_base 5: mod_base = cm
  modified_base 6: mod_base = OTHER; note = 2'O-methyl-adenosine
  modified_base 7: mod_base = OTHER; note = 2' Fluoro-cytidine
  modified_base 8: mod_base = cm
  modified_base 9: mod_base = OTHER; note = 2' Fluoro-uridine
  modified_base 10: mod_base = OTHER; note = 2' Fluoro-guanosine
  modified_base 11: mod_base = OTHER; note = 2' Fluoro-guanosine
  modified_base 12: mod_base = OTHER; note = 2'O-methyl-adenosine
  modified_base 13: mod_base = cm
  modified_base 14: mod_base = OTHER; note = 2'O-methyl-adenosine
  modified_base 15: mod_base = OTHER; note = 2'O-methyl-adenosine
  modified_base 16: mod_base = gm
  modified_base 17: mod_base = um
  modified_base 18: mod_base = OTHER; note = 2'O-methyl-adenosine
  modified_base 19: mod_base = cm
  modified_base 20: mod_base = OTHER; note = 2'O-methyl-adenosine
  modified_base 21: mod_base = OTHER; note = 2'O-methyl-adenosine
  misc_feature 1^2: note = phosphorothioate linkage
  misc_feature 2^3: note = phosphorothioate linkage
tttccacctggacaagtacaa

SEQ ID NO: 614 - RNA, 21 nt, synthetic construct
  source 1..21: mol_type = other RNA
  misc_feature 1..21: note = Description: ZPI siRNA sense strand: ETXS735; corresponding to SEQ ID NO: 294
  modified_base 1: mod_base = um
  modified_base 2: mod_base = cm
  modified_base 3: mod_base = cm
  modified_base 4: mod_base = um
  modified_base 5: mod_base = cm
  modified_base 6: mod_base = OTHER; note = 2'O-methyl-adenosine
  modified_base 7: mod_base = OTHER; note = Af
  modified_base 8: mod_base = OTHER; note = 2'O-methyl-adenosine
  modified_base 9: mod_base = OTHER; note = 2' Fluoro-cytidine
  modified_base 10: mod_base = OTHER; note = 2' Fluoro-uridine
  modified_base 11: mod_base = OTHER; note = 2' Fluoro-guanosine
  modified_base 12: mod_base = cm
  modified_base 13: mod_base = cm
  modified_base 14: mod_base = cm
  modified_base 15: mod_base = um
  modified_base 16: mod_base = OTHER; note = 2'O-methyl-adenosine
  modified_base 17: mod_base = cm
  modified_base 18: mod_base = cm
  modified_base 19: mod_base = OTHER; note = 2'O-methyl-adenosine
  modified_base 20: mod_base = OTHER; note = 2'O-methyl-adenosine
  modified_base 21: mod_base = gm
  misc_feature 1^2: note = phosphorothioate linkage
  misc_feature 2^3: note = phosphorothioate linkage
tcctcaaactgccctaccaag

SEQ ID NO: 615 - RNA, 21 nt, synthetic construct
  source 1..21: mol_type = other RNA
  misc_feature 1..21: note = Description: ZPI siRNA sense strand: ETXS737; corresponding to SEQ ID NO: 295
  modified_base 1: mod_base = OTHER; note = 2'O-methyl-adenosine
  modified_base 2: mod_base = OTHER; note = 2'O-methyl-adenosine
  modified_base 3: mod_base = cm
  modified_base 4: mod_base = um
  modified_base 5: mod_base = gm
  modified_base 6: mod_base = cm
  modified_base 7: mod_base = OTHER; note = 2' Fluoro-cytidine
  modified_base 8: mod_base = cm
  modified_base 9: mod_base = OTHER; note = 2' Fluoro-uridine
  modified_base 10: mod_base = OTHER; note = Af
  modified_base 11: mod_base = OTHER; note = 2' Fluoro-cytidine
  modified_base 12: mod_base = cm
  modified_base 13: mod_base = OTHER; note = 2'O-methyl-adenosine
  modified_base 14: mod_base = OTHER; note = 2'O-methyl-adenosine
  modified_base 15: mod_base = gm
  modified_base 16: mod_base = gm
  modified_base 17: mod_base = OTHER; note = 2'O-methyl-adenosine
  modified_base 18: mod_base = OTHER; note = 2'O-methyl-adenosine
  modified_base 19: mod_base = OTHER; note = 2'O-methyl-adenosine
  modified_base 20: mod_base = um
  modified_base 21: mod_base = gm
  misc_feature 1^2: note = phosphorothioate linkage
  misc_feature 2^3: note = phosphorothioate linkage
aactgccctaccaaggaaatg

SEQ ID NO: 616 - RNA, 21 nt, synthetic construct
  source 1..21: mol_type = other RNA
  misc_feature 1..21: note = Description: ZPI siRNA sense strand: ETXS739; corresponding to SEQ ID NO: 296
  modified_base 1: mod_base = cm
  modified_base 2: mod_base = cm
  modified_base 3: mod_base = um
  modified_base 4: mod_base = cm
  modified_base 5: mod_base = OTHER; note = 2'O-methyl-adenosine
  modified_base 6: mod_base = OTHER; note = 2'O-methyl-adenosine
  modified_base 7: mod_base = OTHER; note = Af
  modified_base 8: mod_base = cm
  modified_base 9: mod_base = OTHER; note = 2' Fluoro-uridine
  modified_base 10: mod_base = OTHER; note = 2' Fluoro-guanosine
  modified_base 11: mod_base = OTHER; note = 2' Fluoro-cytidine
  modified_base 12: mod_base = cm
  modified_base 13: mod_base = cm
  modified_base 14: mod_base = um
  modified_base 15: mod_base = OTHER; note = 2'O-methyl-adenosine
  modified_base 16: mod_base = cm
  modified_base 17: mod_base = cm
  modified_base 18: mod_base = OTHER; note = 2'O-methyl-adenosine
  modified_base 19: mod_base = OTHER; note = 2'O-methyl-adenosine
  modified_base 20: mod_base = gm
  modified_base 21: mod_base = gm
  misc_feature 1^2: note = phosphorothioate linkage
  misc_feature 2^3: note = phosphorothioate linkage
cctcaaactgccctaccaagg

SEQ ID NO: 617 - RNA, 21 nt, synthetic construct
  source 1..21: mol_type = other RNA
  misc_feature 1..21: note = Description: ZPI siRNA sense strand: ETXS741; corresponding to SEQ ID NO: 297
  modified_base 1: mod_base = gm
  modified_base 2: mod_base = um
  modified_base 3: mod_base = cm
  modified_base 4: mod_base = cm
  modified_base 5: mod_base = um
  modified_base 6: mod_base = cm
  modified_base 7: mod_base = OTHER; note = Af
  modified_base 8: mod_base = OTHER; note = 2'O-methyl-adenosine
  modified_base 9: mod_base = OTHER; note = Af
  modified_base 10: mod_base = OTHER; note = 2' Fluoro-cytidine
  modified_base 11: mod_base = OTHER; note = 2' Fluoro-uridine
  modified_base 12: mod_base = gm
  modified_base 13: mod_base = cm
  modified_base 14: mod_base = cm
  modified_base 15: mod_base = cm
  modified_base 16: mod_base = um
  modified_base 17: mod_base = OTHER; note = 2'O-methyl-adenosine
  modified_base 18: mod_base = cm
  modified_base 19: mod_base = cm
  modified_base 20: mod_base = OTHER; note = 2'O-methyl-adenosine
  modified_base 21: mod_base = OTHER; note = 2'O-methyl-adenosine
  misc_feature 1^2: note = phosphorothioate linkage
  misc_feature 2^3: note = phosphorothioate linkage
gtcctcaaactgccctaccaa

SEQ ID NO: 618 - RNA, 21 nt, synthetic construct
  source 1..21: mol_type = other RNA
  misc_feature 1..21: note = Description: ZPI siRNA sense strand: ETXS743; corresponding to SEQ ID NO: 298
  modified_base 1: mod_base = gm
  modified_base 2: mod_base = OTHER; note = 2'O-methyl-adenosine
  modified_base 3: mod_base = cm
  modified_base 4: mod_base = OTHER; note = 2'O-methyl-adenosine
  modified_base 5: mod_base = cm
  modified_base 6: mod_base = um
  modified_base 7: mod_base = OTHER; note = 2' Fluoro-uridine
  modified_base 8: mod_base = um
  modified_base 9: mod_base = OTHER; note = 2' Fluoro-cytidine
  modified_base 10: mod_base = OTHER; note = 2' Fluoro-cytidine
  modified_base 11: mod_base = OTHER; note = Af
  modified_base 12: mod_base = cm
  modified_base 13: mod_base = cm
  modified_base 14: mod_base = um
  modified_base 15: mod_base = gm
  modified_base 16: mod_base = gm
  modified_base 17: mod_base = OTHER; note = 2'O-methyl-adenosine
  modified_base 18: mod_base = cm
  modified_base 19: mod_base = OTHER; note = 2'O-methyl-adenosine
  modified_base 20: mod_base = OTHER; note = 2'O-methyl-adenosine
  modified_base 21: mod_base = gm
  misc_feature 1^2: note = phosphorothioate linkage
  misc_feature 2^3: note = phosphorothioate linkage
gacactttccacctggacaag

SEQ ID NO: 619 - RNA, 21 nt, synthetic construct
  source 1..21: mol_type = other RNA
  misc_feature 1..21: note = Description: ZPI siRNA sense strand: ETXS745; corresponding to SEQ ID NO: 299
  modified_base 1: mod_base = um
  modified_base 2: mod_base = um
  modified_base 3: mod_base = um
  modified_base 4: mod_base = gm
  modified_base 5: mod_base = cm
  modified_base 6: mod_base = cm
  modified_base 7: mod_base = OTHER; note = 2' Fluoro-uridine
  modified_base 8: mod_base = cm
  modified_base 9: mod_base = OTHER; note = 2' Fluoro-cytidine
  modified_base 10: mod_base = OTHER; note = Af
  modified_base 11: mod_base = OTHER; note = 2' Fluoro-cytidine
  modified_base 12: mod_base = cm
  modified_base 13: mod_base = um
  modified_base 14: mod_base = um
  modified_base 15: mod_base = um
  modified_base 16: mod_base = gm
  modified_base 17: mod_base = OTHER; note = 2'O-methyl-adenosine
  modified_base 18: mod_base = cm
  modified_base 19: mod_base = OTHER; note = 2'O-methyl-adenosine
  modified_base 20: mod_base = OTHER; note = 2'O-methyl-adenosine
  modified_base 21: mod_base = gm
  misc_feature 1^2: note = phosphorothioate linkage
  misc_feature 2^3: note = phosphorothioate linkage
tttgcctccacctttgacaag

SEQ ID NO: 620 - RNA, 21 nt, synthetic construct
  source 1..21: mol_type = other RNA
  misc_feature 1..21: note = Description: ZPI siRNA sense strand: ETXS747; corresponding to SEQ ID NO: 300
  modified_base 1: mod_base = OTHER; note = 2'O-methyl-adenosine
  modified_base 2: mod_base = cm
  modified_base 3: mod_base = OTHER; note = 2'O-methyl-adenosine
  modified_base 4: mod_base = cm
  modified_base 5: mod_base = um
  modified_base 6: mod_base = um
  modified_base 7: mod_base = OTHER; note = 2' Fluoro-uridine
  modified_base 8: mod_base = cm
  modified_base 9: mod_base = OTHER; note = 2' Fluoro-cytidine
  modified_base 10: mod_base = OTHER; note = Af
  modified_base 11: mod_base = OTHER; note = 2' Fluoro-cytidine
  modified_base 12: mod_base = cm
  modified_base 13: mod_base = um
  modified_base 14: mod_base = gm
  modified_base 15: mod_base = gm
  modified_base 16: mod_base = OTHER; note = 2'O-methyl-adenosine
  modified_base 17: mod_base = cm
  modified_base 18: mod_base = OTHER; note = 2'O-methyl-adenosine
  modified_base 19: mod_base = OTHER; note = 2'O-methyl-adenosine
  modified_base 20: mod_base = gm
  modified_base 21: mod_base = um
  misc_feature 1^2: note = phosphorothioate linkage
  misc_feature 2^3: note = phosphorothioate linkage
acactttccacctggacaagt

SEQ ID NO: 621 - RNA, 21 nt, synthetic construct
  source 1..21: mol_type = other RNA
  misc_feature 1..21: note = Description: ZPI siRNA sense strand: ETXS749; corresponding to SEQ ID NO: 301
  modified_base 1: mod_base = um
  modified_base 2: mod_base = um
  modified_base 3: mod_base = cm
  modified_base 4: mod_base = cm
  modified_base 5: mod_base = OTHER; note = 2'O-methyl-adenosine
  modified_base 6: mod_base = cm
  modified_base 7: mod_base = OTHER; note = 2' Fluoro-cytidine
  modified_base 8: mod_base = um
  modified_base 9: mod_base = OTHER; note = 2' Fluoro-guanosine
  modified_base 10: mod_base = OTHER; note = 2' Fluoro-guanosine
  modified_base 11: mod_base = OTHER; note = Af
  modified_base 12: mod_base = cm
  modified_base 13: mod_base = OTHER; note = 2'O-methyl-adenosine
  modified_base 14: mod_base = OTHER; note = 2'O-methyl-adenosine
  modified_base 15: mod_base = gm
  modified_base 16: mod_base = um
  modified_base 17: mod_base = OTHER; note = 2'O-methyl-adenosine
  modified_base 18: mod_base = cm
  modified_base 19: mod_base = OTHER; note = 2'O-methyl-adenosine
  modified_base 20: mod_base = OTHER; note = 2'O-methyl-adenosine
  modified_base 21: mod_base = gm
  misc_feature 1^2: note = phosphorothioate linkage
  misc_feature 2^3: note = phosphorothioate linkage
ttccacctggacaagtacaag

SEQ ID NO: 622 - RNA, 21 nt, synthetic construct
  source 1..21: mol_type = other RNA
  misc_feature 1..21: note = Description: ZPI siRNA sense strand: ETXS751; corresponding to SEQ ID NO: 302
  modified_base 1: mod_base = cm
  modified_base 2: mod_base = um
  modified_base 3: mod_base = um
  modified_base 4: mod_base = um
  modified_base 5: mod_base = cm
  modified_base 6: mod_base = cm
  modified_base 7: mod_base = OTHER; note = Af
  modified_base 8: mod_base = cm
  modified_base 9: mod_base = OTHER; note = 2' Fluoro-cytidine
  modified_base 10: mod_base = OTHER; note = 2' Fluoro-uridine
  modified_base 11: mod_base = OTHER; note = 2' Fluoro-guanosine
  modified_base 12: mod_base = gm
  modified_base 13: mod_base = OTHER; note = 2'O-methyl-adenosine
  modified_base 14: mod_base = cm
  modified_base 15: mod_base = OTHER; note = 2'O-methyl-adenosine
  modified_base 16: mod_base = OTHER; note = 2'O-methyl-adenosine
  modified_base 17: mod_base = gm
  modified_base 18: mod_base = um
  modified_base 19: mod_base = OTHER; note = 2'O-methyl-adenosine
  modified_base 20: mod_base = cm
  modified_base 21: mod_base = OTHER; note = 2'O-methyl-adenosine
  misc_feature 1^2: note = phosphorothioate linkage
  misc_feature 2^3: note = phosphorothioate linkage
ctttccacctggacaagtaca

SEQ ID NO: 623 - RNA, 21 nt, synthetic construct
  source 1..21: mol_type = other RNA
  misc_feature 1..21: note = Description: ZPI siRNA sense strand: ETXS753; corresponding to SEQ ID NO: 303
  modified_base 1: mod_base = cm
  modified_base 2: mod_base = um
  modified_base 3: mod_base = cm
  modified_base 4: mod_base = OTHER; note = 2'O-methyl-adenosine
  modified_base 5: mod_base = OTHER; note = 2'O-methyl-adenosine
  modified_base 6: mod_base = OTHER; note = 2'O-methyl-adenosine
  modified_base 7: mod_base = OTHER; note = 2' Fluoro-cytidine
  modified_base 8: mod_base = um
  modified_base 9: mod_base = OTHER; note = 2' Fluoro-guanosine
  modified_base 10: mod_base = OTHER; note = 2' Fluoro-cytidine
  modified_base 11: mod_base = OTHER; note = 2' Fluoro-cytidine
  modified_base 12: mod_base = cm
  modified_base 13: mod_base = um
  modified_base 14: mod_base = OTHER; note = 2'O-methyl-adenosine
  modified_base 15: mod_base = cm
  modified_base 16: mod_base = cm
  modified_base 17: mod_base = OTHER; note = 2'O-methyl-adenosine
  modified_base 18: mod_base = OTHER; note = 2'O-methyl-adenosine
  modified_base 19: mod_base = gm
  modified_base 20: mod_base = gm
  modified_base 21: mod_base = OTHER; note = 2'O-methyl-adenosine
  misc_feature 1^2: note = phosphorothioate linkage
  misc_feature 2^3: note = phosphorothioate linkage
ctcaaactgccctaccaagga

SEQ ID NO: 624 - RNA, 21 nt, synthetic construct
  source 1..21: mol_type = other RNA
  misc_feature 1..21: note = Description: ZPI siRNA sense strand: ETXS755; corresponding to SEQ ID NO: 304
  modified_base 1: mod_base = um
  modified_base 2: mod_base = um
  modified_base 3: mod_base = OTHER; note = 2'O-methyl-adenosine
  modified_base 4: mod_base = cm
  modified_base 5: mod_base = OTHER; note = 2'O-methyl-adenosine
  modified_base 6: mod_base = um
  modified_base 7: mod_base = OTHER; note = 2' Fluoro-cytidine
  modified_base 8: mod_base = um
  modified_base 9: mod_base = OTHER; note = 2' Fluoro-uridine
  modified_base 10: mod_base = OTHER; note = 2' Fluoro-guanosine
  modified_base 11: mod_base = OTHER; note = 2' Fluoro-uridine
  modified_base 12: mod_base = um
  modified_base 13: mod_base = cm
  modified_base 14: mod_base = OTHER; note = 2'O-methyl-adenosine
  modified_base 15: mod_base = OTHER; note = 2'O-methyl-adenosine
  modified_base 16: mod_base = OTHER; note = 2'O-methyl-adenosine
  modified_base 17: mod_base = gm
  modified_base 18: mod_base = gm
  modified_base 19: mod_base = gm
  modified_base 20: mod_base = OTHER; note = 2'O-methyl-adenosine
  modified_base 21: mod_base = OTHER; note = 2'O-methyl-adenosine
  misc_feature 1^2: note = phosphorothioate linkage
  misc_feature 2^3: note = phosphorothioate linkage
ttacatcttgttcaaagggaa

SEQ ID NO: 625 - RNA, 21 nt, synthetic construct
  source 1..21: mol_type = other RNA
  misc_feature 1..21: note = Description: ZPI siRNA sense strand: ETXS757; corresponding to SEQ ID NO: 305
  modified_base 1: mod_base = um
  modified_base 2: mod_base = gm
  modified_base 3: mod_base = cm
  modified_base 4: mod_base = cm
  modified_base 5: mod_base = OTHER; note = 2'O-methyl-adenosine
  modified_base 6: mod_base = cm
  modified_base 7: mod_base = OTHER; note = 2' Fluoro-cytidine
  modified_base 8: mod_base = OTHER; note = 2'O-methyl-adenosine
  modified_base 9: mod_base = OTHER; note = 2' Fluoro-uridine
  modified_base 10: mod_base = OTHER; note = 2' Fluoro-guanosine
  modified_base 11: mod_base = OTHER; note = 2' Fluoro-cytidine
  modified_base 12: mod_base = um
  modified_base 13: mod_base = gm
  modified_base 14: mod_base = gm
  modified_base 15: mod_base = um
  modified_base 16: mod_base = gm
  modified_base 17: mod_base = gm
  modified_base 18: mod_base = um
  modified_base 19: mod_base = cm
  modified_base 20: mod_base = cm
  modified_base 21: mod_base = um
  misc_feature 1^2: note = phosphorothioate linkage
  misc_feature 2^3: note = phosphorothioate linkage
tgccaccatgctggtggtcct

SEQ ID NO: 626 - RNA, 21 nt, synthetic construct
  source 1..21: mol_type = other RNA
  misc_feature 1..21: note = Description: ZPI siRNA sense strand: ETXS759; corresponding to SEQ ID NO: 306
  modified_base 1: mod_base = um
  modified_base 2: mod_base = OTHER; note = 2'O-methyl-adenosine
  modified_base 3: mod_base = um
  modified_base 4: mod_base = cm
  modified_base 5: mod_base = cm
  modified_base 6: mod_base = OTHER; note = 2'O-methyl-adenosine
  modified_base 7: mod_base = OTHER; note = Af
  modified_base 8: mod_base = gm
  modified_base 9: mod_base = OTHER; note = Af
  modified_base 10: mod_base = OTHER; note = 2' Fluoro-guanosine
  modified_base 11: mod_base = OTHER; note = 2' Fluoro-guanosine
  modified_base 12: mod_base = um
  modified_base 13: mod_base = OTHER; note = 2'O-methyl-adenosine
  modified_base 14: mod_base = um
  modified_base 15: mod_base = um
  modified_base 16: mod_base = um
  modified_base 17: mod_base = um
  modified_base 18: mod_base = gm
  modified_base 19: mod_base = OTHER; note = 2'O-methyl-adenosine
  modified_base 20: mod_base = um
  modified_base 21: mod_base = OTHER; note = 2'O-methyl-adenosine
  misc_feature 1^2: note = phosphorothioate linkage
  misc_feature 2^3: note = phosphorothioate linkage
tatccaagaggtattttgata

SEQ ID NO: 627 - RNA, 21 nt, synthetic construct
  source 1..21: mol_type = other RNA
  misc_feature 1..21: note = Description: ZPI siRNA sense strand: ETXS761; corresponding to SEQ ID NO: 307
  modified_base 1: mod_base = OTHER; note = 2'O-methyl-adenosine
  modified_base 2: mod_base = OTHER; note = 2'O-methyl-adenosine
  modified_base 3: mod_base = OTHER; note = 2'O-methyl-adenosine
  modified_base 4: mod_base = um
  modified_base 5: mod_base = gm
  modified_base 6: mod_base = cm
  modified_base 7: mod_base = OTHER; note = 2' Fluoro-cytidine
  modified_base 8: mod_base = OTHER; note = 2'O-methyl-adenosine
  modified_base 9: mod_base = OTHER; note = 2' Fluoro-cytidine
  modified_base 10: mod_base = OTHER; note = 2' Fluoro-cytidine
  modified_base 11: mod_base = OTHER; note = Af
  modified_base 12: mod_base = um
  modified_base 13: mod_base = gm
  modified_base 14: mod_base = cm
  modified_base 15: mod_base = um
  modified_base 16: mod_base = gm
  modified_base 17: mod_base = gm
  modified_base 18: mod_base = um
  modified_base 19: mod_base = gm
  modified_base 20: mod_base = gm
  modified_base 21: mod_base = um
  misc_feature 1^2: note = phosphorothioate linkage
  misc_feature 2^3: note = phosphorothioate linkage
aaatgccaccatgctggtggt

SEQ ID NO: 628 - RNA, 21 nt, synthetic construct
  source 1..21: mol_type = other RNA
  misc_feature 1..21: note = Description: ZPI siRNA sense strand: ETXS763; corresponding to SEQ ID NO: 308
  modified_base 1: mod_base = OTHER; note = 2'O-methyl-adenosine
  modified_base 2: mod_base = um
  modified_base 3: mod_base = um
  modified_base 4: mod_base = OTHER; note = 2'O-methyl-adenosine
  modified_base 5: mod_base = cm
  modified_base 6: mod_base = OTHER; note = 2'O-methyl-adenosine
  modified_base 7: mod_base = OTHER; note = 2' Fluoro-uridine
  modified_base 8: mod_base = cm
  modified_base 9: mod_base = OTHER; note = 2' Fluoro-uridine
  modified_base 10: mod_base = OTHER; note = 2' Fluoro-uridine
  modified_base 11: mod_base = OTHER; note = 2' Fluoro-guanosine
  modified_base 12: mod_base = um
  modified_base 13: mod_base = um
  modified_base 14: mod_base = cm
  modified_base 15: mod_base = OTHER; note = 2'O-methyl-adenosine
  modified_base 16: mod_base = OTHER; note = 2'O-methyl-adenosine
  modified_base 17: mod_base = OTHER; note = 2'O-methyl-adenosine
  modified_base 18: mod_base = gm
  modified_base 19: mod_base = gm
  modified_base 20: mod_base = gm
  modified_base 21: mod_base = OTHER; note = 2'O-methyl-adenosine
  misc_feature 1^2: note = phosphorothioate linkage
  misc_feature 2^3: note = phosphorothioate linkage
attacatcttgttcaaaggga

SEQ ID NO: 629 - RNA, 21 nt, synthetic construct
  source 1..21: mol_type = other RNA
  misc_feature 1..21: note = Description: ZPI siRNA sense strand: ETXS765; corresponding to SEQ ID NO: 309
  modified_base 1: mod_base = cm
  modified_base 2: mod_base = um
  modified_base 3: mod_base = cm
  modified_base 4: mod_base = cm
  modified_base 5: mod_base = OTHER; note = 2'O-methyl-adenosine
  modified_base 6: mod_base = um
  modified_base 7: mod_base = OTHER; note = 2' Fluoro-guanosine
  modified_base 8: mod_base = OTHER; note = 2'O-methyl-adenosine
  modified_base 9: mod_base = OTHER; note = 2' Fluoro-guanosine
  modified_base 10: mod_base = OTHER; note = 2' Fluoro-guanosine
  modified_base 11: mod_base = OTHER; note = 2' Fluoro-cytidine
  modified_base 12: mod_base = OTHER; note = 2'O-methyl-adenosine
  modified_base 13: mod_base = cm
  modified_base 14: mod_base = gm
  modified_base 15: mod_base = OTHER; note = 2'O-methyl-adenosine
  modified_base 16: mod_base = um
  modified_base 17: mod_base = gm
  modified_base 18: mod_base = gm
  modified_base 19: mod_base = cm
  modified_base 20: mod_base = OTHER; note = 2'O-methyl-adenosine
  modified_base 21: mod_base = OTHER; note = 2'O-methyl-adenosine
  misc_feature 1^2: note = phosphorothioate linkage
  misc_feature 2^3: note = phosphorothioate linkage
ctccatgaggcacgatggcaa

SEQ ID NO: 630 - RNA, 21 nt, synthetic construct
  source 1..21: mol_type = other RNA
  misc_feature 1..21: note = Description: ZPI siRNA sense strand: ETXS767; corresponding to SEQ ID NO: 310
  modified_base 1: mod_base = um
  modified_base 2: mod_base = cm
  modified_base 3: mod_base = cm
  modified_base 4: mod_base = OTHER; note = 2'O-methyl-adenosine
  modified_base 5: mod_base = um
  modified_base 6: mod_base = gm
  modified_base 7: mod_base = OTHER; note = 2' Fluoro-cytidine
  modified_base 8: mod_base = cm
  modified_base 9: mod_base = OTHER; note = 2' Fluoro-uridine
  modified_base 10: mod_base = OTHER; note = 2' Fluoro-cytidine
  modified_base 11: mod_base = OTHER; note = 2' Fluoro-cytidine
  modified_base 12: mod_base = um
  modified_base 13: mod_base = gm
  modified_base 14: mod_base = um
  modified_base 15: mod_base = cm
  modified_base 16: mod_base = OTHER; note = 2'O-methyl-adenosine
  modified_base 17: mod_base = um
  modified_base 18: mod_base = cm
  modified_base 19: mod_base = OTHER; note = 2'O-methyl-adenosine
  modified_base 20: mod_base = OTHER; note = 2'O-methyl-adenosine
  modified_base 21: mod_base = OTHER; note = 2'O-methyl-adenosine
  misc_feature 1^2: note = phosphorothioate linkage
  misc_feature 2^3: note = phosphorothioate linkage
tccatgcctcctgtcatcaaa

SEQ ID NO: 631 - RNA, 21 nt, synthetic construct
  source 1..21: mol_type = other RNA
  misc_feature 1..21: note = Description: ZPI siRNA sense strand: ETXS769; corresponding to SEQ ID NO: 311
  modified_base 1: mod_base = OTHER; note = 2'O-methyl-adenosine
  modified_base 2: mod_base = um
  modified_base 3: mod_base = um
  modified_base 4: mod_base = cm
  modified_base 5: mod_base = cm
  modified_base 6: mod_base = OTHER; note = 2'O-methyl-adenosine
  modified_base 7: mod_base = OTHER; note = 2' Fluoro-uridine
  modified_base 8: mod_base = gm
  modified_base 9: mod_base = OTHER; note = 2' Fluoro-cytidine
  modified_base 10: mod_base = OTHER; note = 2' Fluoro-cytidine
  modified_base 11: mod_base = OTHER; note = 2' Fluoro-uridine
  modified_base 12: mod_base = cm
  modified_base 13: mod_base = cm
  modified_base 14: mod_base = um
  modified_base 15: mod_base = gm
  modified_base 16: mod_base = um
  modified_base 17: mod_base = cm
  modified_base 18: mod_base = OTHER; note = 2'O-methyl-adenosine
  modified_base 19: mod_base = um
  modified_base 20: mod_base = cm
  modified_base 21: mod_base = OTHER; note = 2'O-methyl-adenosine
  misc_feature 1^2: note = phosphorothioate linkage
  misc_feature 2^3: note = phosphorothioate linkage
attccatgcctcctgtcatca

SEQ ID NO: 632 - RNA, 21 nt, synthetic construct
  source 1..21: mol_type = other RNA
  misc_feature 1..21: note = Description: ZPI siRNA sense strand: ETXS771; corresponding to SEQ ID NO: 312
  modified_base 1: mod_base = cm
  modified_base 2: mod_base = OTHER; note = 2'O-methyl-adenosine
  modified_base 3: mod_base = OTHER; note = 2'O-methyl-adenosine
  modified_base 4: mod_base = gm
  modified_base 5: mod_base = gm
  modified_base 6: mod_base = OTHER; note = 2'O-methyl-adenosine
  modified_base 7: mod_base = OTHER; note = Af
  modified_base 8: mod_base = OTHER; note = 2'O-methyl-adenosine
  modified_base 9: mod_base = OTHER; note = 2' Fluoro-uridine
  modified_base 10: mod_base = OTHER; note = 2' Fluoro-guanosine
  modified_base 11: mod_base = OTHER; note = 2' Fluoro-cytidine
  modified_base 12: mod_base = cm
  modified_base 13: mod_base = OTHER; note = 2'O-methyl-adenosine
  modified_base 14: mod_base = cm
  modified_base 15: mod_base = cm
  modified_base 16: mod_base = OTHER; note = 2'O-methyl-adenosine
  modified_base 17: mod_base = um
  modified_base 18: mod_base = gm
  modified_base 19: mod_base = cm
  modified_base 20: mod_base = um
  modified_base 21: mod_base = gm
  misc_feature 1^2: note = phosphorothioate linkage
  misc_feature 2^3: note = phosphorothioate linkage
caaggaaatgccaccatgctg

SEQ ID NO: 633 - RNA, 21 nt, synthetic construct
  source 1..21: mol_type = other RNA
  misc_feature 1..21: note = Description: ZPI siRNA sense strand: ETXS773; corresponding to SEQ ID NO: 313
  modified_base 1: mod_base = um
  modified_base 2: mod_base = gm
  modified_base 3: mod_base = gm
  modified_base 4: mod_base = um
  modified_base 5: mod_base = gm
  modified_base 6: mod_base = gm
  modified_base 7: mod_base = OTHER; note = 2' Fluoro-uridine
  modified_base 8: mod_base = cm
  modified_base 9: mod_base = OTHER; note = 2' Fluoro-cytidine
  modified_base 10: mod_base = OTHER; note = 2' Fluoro-uridine
  modified_base 11: mod_base = OTHER; note = 2' Fluoro-cytidine
  modified_base 12: mod_base = OTHER; note = 2'O-methyl-adenosine
  modified_base 13: mod_base = um
  modified_base 14: mod_base = gm
  modified_base 15: mod_base = gm
  modified_base 16: mod_base = OTHER; note = 2'O-methyl-adenosine
  modified_base 17: mod_base = gm
  modified_base 18: mod_base = OTHER; note = 2'O-methyl-adenosine
  modified_base 19: mod_base = OTHER; note = 2'O-methyl-adenosine
  modified_base 20: mod_base = OTHER; note = 2'O-methyl-adenosine
  modified_base 21: mod_base = OTHER; note = 2'O-methyl-adenosine
  misc_feature 1^2: note = phosphorothioate linkage
  misc_feature 2^3: note = phosphorothioate linkage
tggtggtcctcatggagaaaa

SEQ ID NO: 634 - RNA, 21 nt, synthetic construct
  source 1..21: mol_type = other RNA
  misc_feature 1..21: note = Description: ZPI siRNA sense strand: ETXS775; corresponding to SEQ ID NO: 314
  modified_base 1: mod_base = OTHER; note = 2'O-methyl-adenosine
  modified_base 2: mod_base = um
  modified_base 3: mod_base = cm
  modified_base 4: mod_base = um
  modified_base 5: mod_base = um
  modified_base 6: mod_base = gm
  modified_base 7: mod_base = OTHER; note = 2' Fluoro-uridine
  modified_base 8: mod_base = um
  modified_base 9: mod_base = OTHER; note = 2' Fluoro-cytidine
  modified_base 10: mod_base = OTHER; note = Af
  modified_base 11: mod_base = OTHER; note = Af
  modified_base 12: mod_base = OTHER; note = 2'O-methyl-adenosine
  modified_base 13: mod_base = gm
  modified_base 14: mod_base = gm
  modified_base 15: mod_base = gm
  modified_base 16: mod_base = OTHER; note = 2'O-methyl-adenosine
  modified_base 17: mod_base = OTHER; note = 2'O-methyl-adenosine
  modified_base 18: mod_base = OTHER; note = 2'O-methyl-adenosine
  modified_base 19: mod_base = um
  modified_base 20: mod_base = gm
  modified_base 21: mod_base = gm
  misc_feature 1^2: note = phosphorothioate linkage
  misc_feature 2^3: note = phosphorothioate linkage
atcttgttcaaagggaaatgg

SEQ ID NO: 635 - RNA, 21 nt, synthetic construct
  source 1..21: mol_type = other RNA
  misc_feature 1..21: note = Description: ZPI siRNA sense strand: ETXS777; corresponding to SEQ ID NO: 315
  modified_base 1: mod_base = OTHER; note = 2'O-methyl-adenosine
  modified_base 2: mod_base = OTHER; note = 2'O-methyl-adenosine
  modified_base 3: mod_base = gm
  modified_base 4: mod_base = gm
  modified_base 5: mod_base = OTHER; note = 2'O-methyl-adenosine
  modified_base 6: mod_base = OTHER; note = 2'O-methyl-adenosine
  modified_base 7: mod_base = OTHER; note = Af
  modified_base 8: mod_base = um
  modified_base 9: mod_base = OTHER; note = 2' Fluoro-guanosine
  modified_base 10: mod_base = OTHER; note = 2' Fluoro-cytidine
  modified_base 11: mod_base = OTHER; note = 2' Fluoro-cytidine
  modified_base 12: mod_base = OTHER; note = 2'O-methyl-adenosine
  modified_base 13: mod_base = cm
  modified_base 14: mod_base = cm
  modified_base 15: mod_base = OTHER; note = 2'O-methyl-adenosine
  modified_base 16: mod_base = um
  modified_base 17: mod_base = gm
  modified_base 18: mod_base = cm
  modified_base 19: mod_base = um
  modified_base 20: mod_base = gm
  modified_base 21: mod_base = gm
  misc_feature 1^2: note = phosphorothioate linkage
  misc_feature 2^3: note = phosphorothioate linkage
aaggaaatgccaccatgctgg

SEQ ID NO: 636 - RNA, 21 nt, synthetic construct
  source 1..21: mol_type = other RNA
  misc_feature 1..21: note = Description: ZPI siRNA sense strand: ETXS779; corresponding to SEQ ID NO: 316
  modified_base 1: mod_base = gm
  modified_base 2: mod_base = cm
  modified_base 3: mod_base = cm
  modified_base 4: mod_base = um
  modified_base 5: mod_base = cm
  modified_base 6: mod_base = cm
  modified_base 7: mod_base = OTHER; note = Af
  modified_base 8: mod_base = cm
  modified_base 9: mod_base = OTHER; note = 2' Fluoro-cytidine
  modified_base 10: mod_base = OTHER; note = 2' Fluoro-uridine
  modified_base 11: mod_base = OTHER; note = 2' Fluoro-uridine
  modified_base 12: mod_base = um
  modified_base 13: mod_base = gm
  modified_base 14: mod_base = OTHER; note = 2'O-methyl-adenosine
  modified_base 15: mod_base = cm
  modified_base 16: mod_base = OTHER; note = 2'O-methyl-adenosine
  modified_base 17: mod_base = OTHER; note = 2'O-methyl-adenosine
  modified_base 18: mod_base = gm
  modified_base 19: mod_base = OTHER; note = 2'O-methyl-adenosine
  modified_base 20: mod_base = OTHER; note = 2'O-methyl-adenosine
  modified_base 21: mod_base = um
  misc_feature 1^2: note = phosphorothioate linkage
  misc_feature 2^3: note = phosphorothioate linkage
gcctccacctttgacaagaat

SEQ ID NO: 637 - RNA, 21 nt, synthetic construct
  source 1..21: mol_type = other RNA
  misc_feature 1..21: note = Description: ZPI siRNA sense strand: ETXS781; corresponding to SEQ ID NO: 317
  modified_base 1: mod_base = gm
  modified_base 2: mod_base = OTHER; note = 2'O-methyl-adenosine
  modified_base 3: mod_base = gm
  modified_base 4: mod_base = um
  modified_base 5: mod_base = um
  modified_base 6: mod_base = um
  modified_base 7: mod_base = OTHER; note = 2' Fluoro-uridine
  modified_base 8: mod_base = gm
  modified_base 9: mod_base = OTHER; note = 2' Fluoro-cytidine
  modified_base 10: mod_base = OTHER; note = 2' Fluoro-cytidine
  modified_base 11: mod_base = OTHER; note = 2' Fluoro-uridine
  modified_base 12: mod_base = um
  modified_base 13: mod_base = cm
  modified_base 14: mod_base = OTHER; note = 2'O-methyl-adenosine
  modified_base 15: mod_base = um
  modified_base 16: mod_base = cm
  modified_base 17: mod_base = cm
  modified_base 18: mod_base = OTHER; note = 2'O-methyl-adenosine
  modified_base 19: mod_base = cm
  modified_base 20: mod_base = OTHER; note = 2'O-methyl-adenosine
  modified_base 21: mod_base = OTHER; note = 2'O-methyl-adenosine
  misc_feature 1^2: note = phosphorothioate linkage
  misc_feature 2^3: note = phosphorothioate linkage
gagttttgccttcatccacaa

SEQ ID NO: 638 - RNA, 21 nt, synthetic construct
  source 1..21: mol_type = other RNA
  misc_feature 1..21: note = Description: ZPI siRNA sense strand: ETXS783; corresponding to SEQ ID NO: 318
  modified_base 1: mod_base = gm
  modified_base 2: mod_base = cm
  modified_base 3: mod_base = um
  modified_base 4: mod_base = gm
  modified_base 5: mod_base = cm
  modified_base 6: mod_base = gm
  modified_base 7: mod_base = OTHER; note = Af
  modified_base 8: mod_base = OTHER; note = 2'O-methyl-adenosine
  modified_base 9: mod_base = OTHER; note = Af
  modified_base 10: mod_base = OTHER; note = 2' Fluoro-guanosine
  modified_base 11: mod_base = OTHER; note = Af
  modified_base 12: mod_base = um
  modified_base 13: mod_base = cm
  modified_base 14: mod_base = um
  modified_base 15: mod_base = cm
  modified_base 16: mod_base = cm
  modified_base 17: mod_base = OTHER; note = 2'O-methyl-adenosine
  modified_base 18: mod_base = um
  modified_base 19: mod_base = gm
  modified_base 20: mod_base = OTHER; note = 2'O-methyl-adenosine
  modified_base 21: mod_base = gm
  misc_feature 1^2: note = phosphorothioate linkage
  misc_feature 2^3: note = phosphorothioate linkage
gctgcgaaagatctccatgag

SEQ ID NO: 639 - RNA, 21 nt, synthetic construct
  source 1..21: mol_type = other RNA
  misc_feature 1..21: note = Description: ZPI siRNA sense strand: ETXS785; corresponding to SEQ ID NO: 319
  modified_base 1: mod_base = OTHER; note = 2'O-methyl-adenosine
  modified_base 2: mod_base = gm
  modified_base 3: mod_base = um
  modified_base 4: mod_base = um
  modified_base 5: mod_base = um
  modified_base 6: mod_base = gm
  modified_base 7: mod_base = OTHER; note = 2' Fluoro-cytidine
  modified_base 8: mod_base = cm
  modified_base 9: mod_base = OTHER; note = 2' Fluoro-uridine
  modified_base 10: mod_base = OTHER; note = 2' Fluoro-cytidine
  modified_base 11: mod_base = OTHER; note = 2' Fluoro-cytidine
  modified_base 12: mod_base = OTHER; note = 2'O-methyl-adenosine
  modified_base 13: mod_base = cm
  modified_base 14: mod_base = cm
  modified_base 15: mod_base = um
  modified_base 16: mod_base = um
  modified_base 17: mod_base = um
  modified_base 18: mod_base = gm
  modified_base 19: mod_base = OTHER; note = 2'O-methyl-adenosine
  modified_base 20: mod_base = cm
  modified_base 21: mod_base = OTHER; note = 2'O-methyl-adenosine
  misc_feature 1^2: note = phosphorothioate linkage
  misc_feature 2^3: note = phosphorothioate linkage
agtttgcctccacctttgaca

SEQ ID NO: 640 - RNA, 21 nt, synthetic construct
  source 1..21: mol_type = other RNA
  misc_feature 1..21: note = Description: ZPI siRNA sense strand: ETXS787; corresponding to SEQ ID NO: 320
  modified_base 1: mod_base = gm
  modified_base 2: mod_base = um
  modified_base 3: mod_base = um
  modified_base 4: mod_base = um
  modified_base 5: mod_base = gm
  modified_base 6: mod_base = cm
  modified_base 7: mod_base = OTHER; note = 2' Fluoro-cytidine
  modified_base 8: mod_base = um
  modified_base 9: mod_base = OTHER; note = 2' Fluoro-cytidine
  modified_base 10: mod_base = OTHER; note = 2' Fluoro-cytidine
  modified_base 11: mod_base = OTHER; note = Af
  modified_base 12: mod_base = cm
  modified_base 13: mod_base = cm
  modified_base 14: mod_base = um
  modified_base 15: mod_base = um
  modified_base 16: mod_base = um
  modified_base 17: mod_base = gm
  modified_base 18: mod_base = OTHER; note = 2'O-methyl-adenosine
  modified_base 19: mod_base = cm
  modified_base 20: mod_base = OTHER; note = 2'O-methyl-adenosine
  modified_base 21: mod_base = OTHER; note = 2'O-methyl-adenosine
  misc_feature 1^2: note = phosphorothioate linkage
  misc_feature 2^3: note = phosphorothioate linkage
gtttgcctccacctttgacaa

SEQ ID NO: 641 - RNA, 21 nt, synthetic construct
  source 1..21: mol_type = other RNA
  misc_feature 1..21: note = Description: ZPI siRNA sense strand: ETXS789; corresponding to SEQ ID NO: 321
  modified_base 1: mod_base = cm
  modified_base 2: mod_base = OTHER; note = 2'O-methyl-adenosine
  modified_base 3: mod_base = um
  modified_base 4: mod_base = cm
  modified_base 5: mod_base = um
  modified_base 6: mod_base = um
  modified_base 7: mod_base = OTHER; note = 2' Fluoro-guanosine
  modified_base 8: mod_base = um
  modified_base 9: mod_base = OTHER; note = 2' Fluoro-uridine
  modified_base 10: mod_base = OTHER; note = 2' Fluoro-cytidine
  modified_base 11: mod_base = OTHER; note = Af
  modified_base 12: mod_base = OTHER; note = 2'O-methyl-adenosine
  modified_base 13: mod_base = OTHER; note = 2'O-methyl-adenosine
  modified_base 14: mod_base = gm
  modified_base 15: mod_base = gm
  modified_base 16: mod_base = gm
  modified_base 17: mod_base = OTHER; note = 2'O-methyl-adenosine
  modified_base 18: mod_base = OTHER; note = 2'O-methyl-adenosine
  modified_base 19: mod_base = OTHER; note = 2'O-methyl-adenosine
  modified_base 20: mod_base = um
  modified_base 21: mod_base = gm
  misc_feature 1^2: note = phosphorothioate linkage
  misc_feature 2^3: note = phosphorothioate linkage
catcttgttcaaagggaaatg

SEQ ID NO: 642 - RNA, 21 nt, synthetic construct
  source 1..21: mol_type = other RNA
  misc_feature 1..21: note = Description: ZPI siRNA sense strand: ETXS791; corresponding to SEQ ID NO: 322
  modified_base 1: mod_base = gm
  modified_base 2: mod_base = gm
  modified_base 3: mod_base = OTHER; note = 2'O-methyl-adenosine
  modified_base 4: mod_base = gm
  modified_base 5: mod_base = um
  modified_base 6: mod_base = um
  modified_base 7: mod_base = OTHER; note = 2' Fluoro-uridine
  modified_base 8: mod_base = um
  modified_base 9: mod_base = OTHER; note = 2' Fluoro-guanosine
  modified_base 10: mod_base = OTHER; note = 2' Fluoro-cytidine
  modified_base 11: mod_base = OTHER; note = 2' Fluoro-cytidine
  modified_base 12: mod_base = um
  modified_base 13: mod_base = um
  modified_base 14: mod_base = cm
  modified_base 15: mod_base = OTHER; note = 2'O-methyl-adenosine
  modified_base 16: mod_base = um
  modified_base 17: mod_base = cm
  modified_base 18: mod_base = cm
  modified_base 19: mod_base = OTHER; note = 2'O-methyl-adenosine
  modified_base 20: mod_base = cm
  modified_base 21: mod_base = OTHER; note = 2'O-methyl-adenosine
  misc_feature 1^2: note = phosphorothioate linkage
  misc_feature 2^3: note = phosphorothioate linkage
ggagttttgccttcatccaca

SEQ ID NO: 643 - RNA, 21 nt, synthetic construct
  source 1..21: mol_type = other RNA
  misc_feature 1..21: note = Description: ZPI siRNA sense strand: ETXS793; corresponding to SEQ ID NO: 323
  modified_base 1: mod_base = cm
  modified_base 2: mod_base = um
  modified_base 3: mod_base = gm
  modified_base 4: mod_base = cm
  modified_base 5: mod_base = gm
  modified_base 6: mod_base = OTHER; note = 2'O-methyl-adenosine
  modified_base 7: mod_base = OTHER; note = Af
  modified_base 8: mod_base = OTHER; note = 2'O-methyl-adenosine
  modified_base 9: mod_base = OTHER; note = 2' Fluoro-guanosine
  modified_base 10: mod_base = OTHER; note = Af
  modified_base 11: mod_base = OTHER; note = 2' Fluoro-uridine
  modified_base 12: mod_base = cm
  modified_base 13: mod_base = um
  modified_base 14: mod_base = cm
  modified_base 15: mod_base = cm
  modified_base 16: mod_base = OTHER; note = 2'O-methyl-adenosine
  modified_base 17: mod_base = um
  modified_base 18: mod_base = gm
  modified_base 19: mod_base = OTHER; note = 2'O-methyl-adenosine
  modified_base 20: mod_base = gm
  modified_base 21: mod_base = gm
  misc_feature 1^2: note = phosphorothioate linkage
  misc_feature 2^3: note = phosphorothioate linkage
ctgcgaaagatctccatgagg

SEQ ID NO: 644 - RNA, 21 nt, synthetic construct
  source 1..21: mol_type = other RNA
  misc_feature 1..21: note = Description: ZPI siRNA sense strand: ETXS795; corresponding to SEQ ID NO: 324
  modified_base 1: mod_base = cm
  modified_base 2: mod_base = cm
  modified_base 3: mod_base = OTHER; note = 2'O-methyl-adenosine
  modified_base 4: mod_base = um
  modified_base 5: mod_base = gm
  modified_base 6: mod_base = cm
  modified_base 7: mod_base = OTHER; note = 2' Fluoro-cytidine
  modified_base 8: mod_base = um
  modified_base 9: mod_base = OTHER; note = 2' Fluoro-cytidine
  modified_base 10: mod_base = OTHER; note = 2' Fluoro-cytidine
  modified_base 11: mod_base = OTHER; note = 2' Fluoro-uridine
  modified_base 12: mod_base = gm
  modified_base 13: mod_base = um
  modified_base 14: mod_base = cm
  modified_base 15: mod_base = OTHER; note = 2'O-methyl-adenosine
  modified_base 16: mod_base = um
  modified_base 17: mod_base = cm
  modified_base 18: mod_base = OTHER; note = 2'O-methyl-adenosine
  modified_base 19: mod_base = OTHER; note = 2'O-methyl-adenosine
  modified_base 20: mod_base = OTHER; note = 2'O-methyl-adenosine
  modified_base 21: mod_base = gm
  misc_feature 1^2: note = phosphorothioate linkage
  misc_feature 2^3: note = phosphorothioate linkage
ccatgcctcctgtcatcaaag

SEQ ID NO: 645 - RNA, 21 nt, synthetic construct
  source 1..21: mol_type = other RNA
  misc_feature 1..21: note = Description: ZPI siRNA sense strand: ETXS797; corresponding to SEQ ID NO: 325
  modified_base 1: mod_base = um
  modified_base 2: mod_base = gm
  modified_base 3: mod_base = um
  modified_base 4: mod_base = um
  modified_base 5: mod_base = um
  modified_base 6: mod_base = cm
  modified_base 7: mod_base = OTHER; note = 2' Fluoro-uridine
  modified_base 8: mod_base = gm
  modified_base 9: mod_base = OTHER; note = 2' Fluoro-guanosine
  modified_base 10: mod_base = OTHER; note = 2' Fluoro-guanosine
  modified_base 11: mod_base = OTHER; note = 2' Fluoro-cytidine
  modified_base 12: mod_base = OTHER; note = 2'O-methyl-adenosine
  modified_base 13: mod_base = gm
  modified_base 14: mod_base = gm
  modified_base 15: mod_base = gm
  modified_base 16: mod_base = um
  modified_base 17: mod_base = gm
  modified_base 18: mod_base = gm
  modified_base 19: mod_base = um
  modified_base 20: mod_base = gm
  modified_base 21: mod_base = OTHER; note = 2'O-methyl-adenosine
  misc_feature 1^2: note = phosphorothioate linkage
  misc_feature 2^3: note = phosphorothioate linkage
tgtttctgggcagggtggtga

SEQ ID NO: 646 - RNA, 21 nt, synthetic construct
  source 1..21: mol_type = other RNA
  misc_feature 1..21: note = Description: ZPI siRNA sense strand: ETXS799; corresponding to SEQ ID NO: 326
  modified_base 1: mod_base = gm
  modified_base 2: mod_base = cm
  modified_base 3: mod_base = cm
  modified_base 4: mod_base = um
  modified_base 5: mod_base = gm
  modified_base 6: mod_base = cm
  modified_base 7: mod_base = OTHER; note = 2' Fluoro-uridine
  modified_base 8: mod_base = gm
  modified_base 9: mod_base = OTHER; note = 2' Fluoro-cytidine
  modified_base 10: mod_base = OTHER; note = 2' Fluoro-guanosine
  modified_base 11: mod_base = OTHER; note = Af
  modified_base 12: mod_base = OTHER; note = 2'O-methyl-adenosine
  modified_base 13: mod_base = OTHER; note = 2'O-methyl-adenosine
  modified_base 14: mod_base = gm
  modified_base 15: mod_base = OTHER; note = 2'O-methyl-adenosine
  modified_base 16: mod_base = um
  modified_base 17: mod_base = cm
  modified_base 18: mod_base = um
  modified_base 19: mod_base = cm
  modified_base 20: mod_base = cm
  modified_base 21: mod_base = OTHER; note = 2'O-methyl-adenosine
  misc_feature 1^2: note = phosphorothioate linkage
  misc_feature 2^3: note = phosphorothioate linkage
gcctgctgcgaaagatctcca

SEQ ID NO: 647 - RNA, 21 nt, synthetic construct
  source 1..21: mol_type = other RNA
  misc_feature 1..21: note = Description: ZPI siRNA sense strand: ETXS801; corresponding to SEQ ID NO: 327
  modified_base 1: mod_base = OTHER; note = 2'O-methyl-adenosine
  modified_base 2: mod_base = OTHER; note = 2'O-methyl-adenosine
  modified_base 3: mod_base = cm
  modified_base 4: mod_base = um
  modified_base 5: mod_base = gm
  modified_base 6: mod_base = um
  modified_base 7: mod_base = OTHER; note = 2' Fluoro-uridine
  modified_base 8: mod_base = um
  modified_base 9: mod_base = OTHER; note = 2' Fluoro-guanosine
  modified_base 10: mod_base = OTHER; note = Af
  modified_base 11: mod_base = OTHER; note = 2' Fluoro-uridine
  modified_base 12: mod_base = gm
  modified_base 13: mod_base = OTHER; note = 2'O-methyl-adenosine
  modified_base 14: mod_base = gm
  modified_base 15: mod_base = OTHER; note = 2'O-methyl-adenosine
  modified_base 16: mod_base = um
  modified_base 17: mod_base = um
  modified_base 18: mod_base = OTHER; note = 2'O-methyl-adenosine
  modified_base 19: mod_base = OTHER; note = 2'O-methyl-adenosine
  modified_base 20: mod_base = um
  modified_base 21: mod_base = cm
  misc_feature 1^2: note = phosphorothioate linkage
  misc_feature 2^3: note = phosphorothioate linkage
aactgtttgatgagattaatc

SEQ ID NO: 648 - RNA, 21 nt, synthetic construct
  source 1..21: mol_type = other RNA
  misc_feature 1..21: note = Description: ZPI siRNA sense strand: ETXS803; corresponding to SEQ ID NO: 328
  modified_base 1: mod_base = OTHER; note = 2'O-methyl-adenosine
  modified_base 2: mod_base = um
  modified_base 3: mod_base = gm
  modified_base 4: mod_base = cm
  modified_base 5: mod_base = cm
  modified_base 6: mod_base = um
  modified_base 7: mod_base = OTHER; note = 2' Fluoro-cytidine
  modified_base 8: mod_base = cm
  modified_base 9: mod_base = OTHER; note = 2' Fluoro-uridine
  modified_base 10: mod_base = OTHER; note = 2' Fluoro-guanosine
  modified_base 11: mod_base = OTHER; note = 2' Fluoro-uridine
  modified_base 12: mod_base = cm
  modified_base 13: mod_base = OTHER; note = 2'O-methyl-adenosine
  modified_base 14: mod_base = um
  modified_base 15: mod_base = cm
  modified_base 16: mod_base = OTHER; note = 2'O-methyl-adenosine
  modified_base 17: mod_base = OTHER; note = 2'O-methyl-adenosine
  modified_base 18: mod_base = OTHER; note = 2'O-methyl-adenosine
  modified_base 19: mod_base = gm
  modified_base 20: mod_base = um
  modified_base 21: mod_base = gm
  misc_feature 1^2: note = phosphorothioate linkage
  misc_feature 2^3: note = phosphorothioate linkage
atgcctcctgtcatcaaagtg

SEQ ID NO: 649 - RNA, 21 nt, synthetic construct
  source 1..21: mol_type = other RNA
  misc_feature 1..21: note = Description: ZPI siRNA sense strand: ETXS805; corresponding to SEQ ID NO: 329
  modified_base 1: mod_base = OTHER; note = 2'O-methyl-adenosine
  modified_base 2: mod_base = gm
  modified_base 3: mod_base = um
  modified_base 4: mod_base = OTHER; note = 2'O-methyl-adenosine
  modified_base 5: mod_base = um
  modified_base 6: mod_base = gm
  modified_base 7: mod_base = OTHER; note = Af
  modified_base 8: mod_base = gm
  modified_base 9: mod_base = OTHER; note = Af
  modified_base 10: mod_base = OTHER; note = 2' Fluoro-uridine
  modified_base 11: mod_base = OTHER; note = 2' Fluoro-guanosine
  modified_base 12: mod_base = cm
  modified_base 13: mod_base = OTHER; note = 2'O-methyl-adenosine
  modified_base 14: mod_base = um
  modified_base 15: mod_base = gm
  modified_base 16: mod_base = OTHER; note = 2'O-methyl-adenosine
  modified_base 17: mod_base = gm
  modified_base 18: mod_base = cm
  modified_base 19: mod_base = um
  modified_base 20: mod_base = gm
  modified_base 21: mod_base = cm
  misc_feature 1^2: note = phosphorothioate linkage
  misc_feature 2^3: note = phosphorothioate linkage
agtatgagatgcatgagctgc

SEQ ID NO: 650 - RNA, 21 nt, synthetic construct
  source 1..21: mol_type = other RNA
  misc_feature 1..21: note = Description: ZPI siRNA sense strand: ETXS807; corresponding to SEQ ID NO: 330
  modified_base 1: mod_base = OTHER; note = 2'O-methyl-adenosine
  modified_base 2: mod_base = OTHER; note = 2'O-methyl-adenosine
  modified_base 3: mod_base = gm
  modified_base 4: mod_base = um
  modified_base 5: mod_base = OTHER; note = 2'O-methyl-adenosine
  modified_base 6: mod_base = um
  modified_base 7: mod_base = OTHER; note = 2' Fluoro-guanosine
  modified_base 8: mod_base = OTHER; note = 2'O-methyl-adenosine
  modified_base 9: mod_base = OTHER; note = 2' Fluoro-guanosine
  modified_base 10: mod_base = OTHER; note = Af
  modified_base 11: mod_base = OTHER; note = 2' Fluoro-uridine
  modified_base 12: mod_base = gm
  modified_base 13: mod_base = cm
  modified_base 14: mod_base = OTHER; note = 2'O-methyl-adenosine
  modified_base 15: mod_base = um
  modified_base 16: mod_base = gm
  modified_base 17: mod_base = OTHER; note = 2'O-methyl-adenosine
  modified_base 18: mod_base = gm
  modified_base 19: mod_base = cm
  modified_base 20: mod_base = um
  modified_base 21: mod_base = gm
  misc_feature 1^2: note = phosphorothioate linkage
  misc_feature 2^3: note = phosphorothioate linkage
aagtatgagatgcatgagctg

SEQ ID NO: 651 - RNA, 21 nt, synthetic construct
  source 1..21: mol_type = other RNA
  misc_feature 1..21: note = Description: ZPI siRNA sense strand: ETXS809; corresponding to SEQ ID NO: 331
  modified_base 1: mod_base = um
  modified_base 2: mod_base = gm
  modified_base 3: mod_base = um
  modified_base 4: mod_base = cm
  modified_base 5: mod_base = cm
  modified_base 6: mod_base = um
  modified_base 7: mod_base = OTHER; note = 2' Fluoro-cytidine
  modified_base 8: mod_base = OTHER; note = 2'O-methyl-adenosine
  modified_base 9: mod_base = OTHER; note = Af
  modified_base 10: mod_base = OTHER; note = Af
  modified_base 11: mod_base = OTHER; note = 2' Fluoro-cytidine
  modified_base 12: mod_base = um
  modified_base 13: mod_base = gm
  modified_base 14: mod_base = cm
  modified_base 15: mod_base = cm
  modified_base 16: mod_base = cm
  modified_base 17: mod_base = um
  modified_base 18: mod_base = OTHER; note = 2'O-methyl-adenosine
  modified_base 19: mod_base = cm
  modified_base 20: mod_base = cm
  modified_base 21: mod_base = OTHER; note = 2'O-methyl-adenosine
  misc_feature 1^2: note = phosphorothioate linkage
  misc_feature 2^3: note = phosphorothioate linkage
tgtcctcaaactgccctacca

SEQ ID NO: 652 - RNA, 21 nt, synthetic construct
  source 1..21: mol_type = other RNA
  misc_feature 1..21: note = Description: ZPI siRNA sense strand: ETXS811; corresponding to SEQ ID NO: 332
  modified_base 1: mod_base = OTHER; note = 2'O-methyl-adenosine
  modified_base 2: mod_base = cm
  modified_base 3: mod_base = um
  modified_base 4: mod_base = gm
  modified_base 5: mod_base = um
  modified_base 6: mod_base = um
  modified_base 7: mod_base = OTHER; note = 2' Fluoro-uridine
  modified_base 8: mod_base = gm
  modified_base 9: mod_base = OTHER; note = Af
  modified_base 10: mod_base = OTHER; note = 2' Fluoro-uridine
  modified_base 11: mod_base = OTHER; note = 2' Fluoro-guanosine
  modified_base 12: mod_base = OTHER; note = 2'O-methyl-adenosine
  modified_base 13: mod_base = gm
  modified_base 14: mod_base = OTHER; note = 2'O-methyl-adenosine
  modified_base 15: mod_base = um
  modified_base 16: mod_base = um
  modified_base 17: mod_base = OTHER; note = 2'O-methyl-adenosine
  modified_base 18: mod_base = OTHER; note = 2'O-methyl-adenosine
  modified_base 19: mod_base = um
  modified_base 20: mod_base = cm
  modified_base 21: mod_base = cm
  misc_feature 1^2: note = phosphorothioate linkage
  misc_feature 2^3: note = phosphorothioate linkage
actgtttgatgagattaatcc

SEQ ID NO: 653 - RNA, 21 nt, synthetic construct
  source 1..21: mol_type = other RNA
  misc_feature 1..21: note = Description: ZPI siRNA sense strand: ETXS813; corresponding to SEQ ID NO: 333
  modified_base 1: mod_base = gm
  modified_base 2: mod_base = OTHER; note = 2'O-methyl-adenosine
  modified_base 3: mod_base = cm
  modified_base 4: mod_base = cm
  modified_base 5: mod_base = OTHER; note = 2'O-methyl-adenosine
  modified_base 6: mod_base = um
  modified_base 7: mod_base = OTHER; note = 2' Fluoro-uridine
  modified_base 8: mod_base = OTHER; note = 2'O-methyl-adenosine
  modified_base 9: mod_base = OTHER; note = Af
  modified_base 10: mod_base = OTHER; note = 2' Fluoro-guanosine
  modified_base 11: mod_base = OTHER; note = 2' Fluoro-guanosine
  modified_base 12: mod_base = um
  modified_base 13: mod_base = gm
  modified_base 14: mod_base = cm
  modified_base 15: mod_base = cm
  modified_base 16: mod_base = cm
  modified_base 17: mod_base = OTHER; note = 2'O-methyl-adenosine
  modified_base 18: mod_base = um
  modified_base 19: mod_base = gm
  modified_base 20: mod_base = OTHER; note = 2'O-methyl-adenosine
  modified_base 21: mod_base = um
  misc_feature 1^2: note = phosphorothioate linkage
  misc_feature 2^3: note = phosphorothioate linkage
gaccattaaggtgcccatgat

SEQ ID NO: 654 - RNA, 21 nt, synthetic construct
  source 1..21: mol_type = other RNA
  misc_feature 1..21: note = Description: ZPI siRNA sense strand: ETXS815; corresponding to SEQ ID NO: 334
  modified_base 1: mod_base = OTHER; note = 2'O-methyl-adenosine
  modified_base 2: mod_base = cm
  modified_base 3: mod_base = cm
  modified_base 4: mod_base = OTHER; note = 2'O-methyl-adenosine
  modified_base 5: mod_base = um
  modified_base 6: mod_base = um
  modified_base 7: mod_base = OTHER; note = Af
  modified_base 8: mod_base = OTHER; note = 2'O-methyl-adenosine
  modified_base 9: mod_base = OTHER; note = 2' Fluoro-guanosine
  modified_base 10: mod_base = OTHER; note = 2' Fluoro-guanosine
  modified_base 11: mod_base = OTHER; note = 2' Fluoro-uridine
  modified_base 12: mod_base = gm
  modified_base 13: mod_base = cm
  modified_base 14: mod_base = cm
  modified_base 15: mod_base = cm
  modified_base 16: mod_base = OTHER; note = 2'O-methyl-adenosine
  modified_base 17: mod_base = um
  modified_base 18: mod_base = gm
  modified_base 19: mod_base = OTHER; note = 2'O-methyl-adenosine
  modified_base 20: mod_base = um
  modified_base 21: mod_base = gm
  misc_feature 1^2: note = phosphorothioate linkage
  misc_feature 2^3: note = phosphorothioate linkage
accattaaggtgcccatgatg

SEQ ID NO: 655 - RNA, 21 nt, synthetic construct
  source 1..21: mol_type = other RNA
  misc_feature 1..21: note = Description: ZPI siRNA sense strand: ETXS817; corresponding to SEQ ID NO: 335
  modified_base 1: mod_base = gm
  modified_base 2: mod_base = um
  modified_base 3: mod_base = um
  modified_base 4: mod_base = um
  modified_base 5: mod_base = cm
  modified_base 6: mod_base = um
  modified_base 7: mod_base = OTHER; note = 2' Fluoro-guanosine
  modified_base 8: mod_base = gm
  modified_base 9: mod_base = OTHER; note = 2' Fluoro-guanosine
  modified_base 10: mod_base = OTHER; note = 2' Fluoro-cytidine
  modified_base 11: mod_base = OTHER; note = Af
  modified_base 12: mod_base = gm
  modified_base 13: mod_base = gm
  modified_base 14: mod_base = gm
  modified_base 15: mod_base = um
  modified_base 16: mod_base = gm
  modified_base 17: mod_base = gm
  modified_base 18: mod_base = um
  modified_base 19: mod_base = gm
  modified_base 20: mod_base = OTHER; note = 2'O-methyl-adenosine
  modified_base 21: mod_base = OTHER; note = 2'O-methyl-adenosine
  misc_feature 1^2: note = phosphorothioate linkage
  misc_feature 2^3: note = phosphorothioate linkage
gtttctgggcagggtggtgaa

SEQ ID NO: 656 - RNA, 21 nt, synthetic construct
  source 1..21: mol_type = other RNA
  misc_feature 1..21: note = Description: ZPI siRNA sense strand: ETXS819; corresponding to SEQ ID NO: 336
  modified_base 1: mod_base = um
  modified_base 2: mod_base = um
  modified_base 3: mod_base = cm
  modified_base 4: mod_base = um
  modified_base 5: mod_base = gm
  modified_base 6: mod_base = um
  modified_base 7: mod_base = OTHER; note = 2' Fluoro-uridine
  modified_base 8: mod_base = um
  modified_base 9: mod_base = OTHER; note = 2' Fluoro-cytidine
  modified_base 10: mod_base = OTHER; note = 2' Fluoro-uridine
  modified_base 11: mod_base = OTHER; note = 2' Fluoro-guanosine
  modified_base 12: mod_base = gm
  modified_base 13: mod_base = gm
  modified_base 14: mod_base = cm
  modified_base 15: mod_base = OTHER; note = 2'O-methyl-adenosine
  modified_base 16: mod_base = gm
  modified_base 17: mod_base = gm
  modified_base 18: mod_base = gm
  modified_base 19: mod_base = um
  modified_base 20: mod_base = gm
  modified_base 21: mod_base = gm
  misc_feature 1^2: note = phosphorothioate linkage
  misc_feature 2^3: note = phosphorothioate linkage
ttctgtttctgggcagggtgg

SEQ ID NO: 657 - RNA, 21 nt, synthetic construct
  source 1..21: mol_type = other RNA
  misc_feature 1..21: note = Description: ZPI siRNA sense strand: ETXS821; corresponding to SEQ ID NO: 337
  modified_base 1: mod_base = um
  modified_base 2: mod_base = um
  modified_base 3: mod_base = um
  modified_base 4: mod_base = um
  modified_base 5: mod_base = cm
  modified_base 6: mod_base = um
  modified_base 7: mod_base = OTHER; note = 2' Fluoro-uridine
  modified_base 8: mod_base = um
  modified_base 9: mod_base = OTHER; note = 2' Fluoro-cytidine
  modified_base 10: mod_base = OTHER; note = 2' Fluoro-cytidine
  modified_base 11: mod_base = OTHER; note = 2' Fluoro-guanosine
  modified_base 12: mod_base = OTHER; note = 2'O-methyl-adenosine
  modified_base 13: mod_base = OTHER; note = 2'O-methyl-adenosine
  modified_base 14: mod_base = gm
  modified_base 15: mod_base = um
  modified_base 16: mod_base = um
  modified_base 17: mod_base = cm
  modified_base 18: mod_base = OTHER; note = 2'O-methyl-adenosine
  modified_base 19: mod_base = OTHER; note = 2'O-methyl-adenosine
  modified_base 20: mod_base = gm
  modified_base 21: mod_base = cm
  misc_feature 1^2: note = phosphorothioate linkage
  misc_feature 2^3: note = phosphorothioate linkage
ttttctttccgaagttcaagc

SEQ ID NO: 658 - RNA, 21 nt, synthetic construct
  source 1..21: mol_type = other RNA
  misc_feature 1..21: note = Description: ZPI siRNA sense strand: ETXS823; corresponding to SEQ ID NO: 338
  modified_base 1: mod_base = um
  modified_base 2: mod_base = um
  modified_base 3: mod_base = um
  modified_base 4: mod_base = cm
  modified_base 5: mod_base = um
  modified_base 6: mod_base = um
  modified_base 7: mod_base = OTHER; note = 2' Fluoro-uridine
  modified_base 8: mod_base = cm
  modified_base 9: mod_base = OTHER; note = 2' Fluoro-cytidine
  modified_base 10: mod_base = OTHER; note = 2' Fluoro-guanosine
  modified_base 11: mod_base = OTHER; note = Af
  modified_base 12: mod_base = OTHER; note = 2'O-methyl-adenosine
  modified_base 13: mod_base = gm
  modified_base 14: mod_base = um
  modified_base 15: mod_base = um
  modified_base 16: mod_base = cm
  modified_base 17: mod_base = OTHER; note = 2'O-methyl-adenosine
  modified_base 18: mod_base = OTHER; note = 2'O-methyl-adenosine
  modified_base 19: mod_base = gm
  modified_base 20: mod_base = cm
  modified_base 21: mod_base = um
  misc_feature 1^2: note = phosphorothioate linkage
  misc_feature 2^3: note = phosphorothioate linkage
tttctttccgaagttcaagct

SEQ ID NO: 659 - RNA, 21 nt, synthetic construct
  source 1..21: mol_type = other RNA
  misc_feature 1..21: note = Description: ZPI siRNA sense strand: ETXS825; corresponding to SEQ ID NO: 339
  modified_base 1: mod_base = um
  modified_base 2: mod_base = cm
  modified_base 3: mod_base = um
  modified_base 4: mod_base = gm
  modified_base 5: mod_base = um
  modified_base 6: mod_base = um
  modified_base 7: mod_base = OTHER; note = 2' Fluoro-uridine
  modified_base 8: mod_base = cm
  modified_base 9: mod_base = OTHER; note = 2' Fluoro-uridine
  modified_base 10: mod_base = OTHER; note = 2' Fluoro-guanosine
  modified_base 11: mod_base = OTHER; note = 2' Fluoro-guanosine
  modified_base 12: mod_base = gm
  modified_base 13: mod_base = cm
  modified_base 14: mod_base = OTHER; note = 2'O-methyl-adenosine
  modified_base 15: mod_base = gm
  modified_base 16: mod_base = gm
  modified_base 17: mod_base = gm
  modified_base 18: mod_base = um
  modified_base 19: mod_base = gm
  modified_base 20: mod_base = gm
  modified_base 21: mod_base = um
  misc_feature 1^2: note = phosphorothioate linkage
  misc_feature 2^3: note = phosphorothioate linkage
tctgtttctgggcagggtggt

SEQ ID NO: 660 - RNA, 21 nt, synthetic construct
  source 1..21: mol_type = other RNA
  misc_feature 1..21: note = Description: ZPI siRNA sense strand: ETXS827; corresponding to SEQ ID NO: 340
  modified_base 1: mod_base = OTHER; note = 2'O-methyl-adenosine
  modified_base 2: mod_base = um
  modified_base 3: mod_base = gm
  modified_base 4: mod_base = um
  modified_base 5: mod_base = cm
  modified_base 6: mod_base = cm
  modified_base 7: mod_base = OTHER; note = 2' Fluoro-uridine
  modified_base 8: mod_base = cm
  modified_base 9: mod_base = OTHER; note = Af
  modified_base 10: mod_base = OTHER; note = Af
  modified_base 11: mod_base = OTHER; note = Af
  modified_base 12: mod_base = cm
  modified_base 13: mod_base = um
  modified_base 14: mod_base = gm
  modified_base 15: mod_base = cm
  modified_base 16: mod_base = cm
  modified_base 17: mod_base = cm
  modified_base 18: mod_base = um
  modified_base 19: mod_base = OTHER; note = 2'O-methyl-adenosine
  modified_base 20: mod_base = cm
  modified_base 21: mod_base = cm
  misc_feature 1^2: note = phosphorothioate linkage
  misc_feature 2^3: note = phosphorothioate linkage
atgtcctcaaactgccctacc

SEQ ID NO: 661 - RNA, 21 nt, synthetic construct
  source 1..21: mol_type = other RNA
  misc_feature 1..21: note = Description: ZPI siRNA sense strand: ETXS829; corresponding to SEQ ID NO: 341
  modified_base 1: mod_base = um
  modified_base 2: mod_base = cm
  modified_base 3: mod_base = gm
  modified_base 4: mod_base = OTHER; note = 2'O-methyl-adenosine
  modified_base 5: mod_base = cm
  modified_base 6: mod_base = OTHER; note = 2'O-methyl-adenosine
  modified_base 7: mod_base = OTHER; note = 2' Fluoro-cytidine
  modified_base 8: mod_base = um
  modified_base 9: mod_base = OTHER; note = 2' Fluoro-uridine
  modified_base 10: mod_base = OTHER; note = 2' Fluoro-uridine
  modified_base 11: mod_base = OTHER; note = 2' Fluoro-cytidine
  modified_base 12: mod_base = cm
  modified_base 13: mod_base = OTHER; note = 2'O-methyl-adenosine
  modified_base 14: mod_base = cm
  modified_base 15: mod_base = cm
  modified_base 16: mod_base = um
  modified_base 17: mod_base = gm
  modified_base 18: mod_base = gm
  modified_base 19: mod_base = OTHER; note = 2'O-methyl-adenosine
  modified_base 20: mod_base = cm
  modified_base 21: mod_base = OTHER; note = 2'O-methyl-adenosine
  misc_feature 1^2: note = phosphorothioate linkage
  misc_feature 2^3: note = phosphorothioate linkage
tcgacactttccacctggaca

SEQ ID NO: 662 - RNA, 19 nt, synthetic construct
  source 1..19: mol_type = other RNA
  misc_feature 1..19: note = Description: ZPI siRNA sense strand: ETXS831; corresponding to SEQ ID NO: 342
  modified_base 1: mod_base = OTHER; note = 2' Fluoro-cytidine
  modified_base 2: mod_base = cm
  modified_base 3: mod_base = OTHER; note = 2' Fluoro-uridine
  modified_base 4: mod_base = um
  modified_base 5: mod_base = OTHER; note = 2' Fluoro-cytidine
  modified_base 6: mod_base = OTHER; note = 2'O-methyl-adenosine
  modified_base 7: mod_base = OTHER; note = 2' Fluoro-uridine
  modified_base 8: mod_base = cm
  modified_base 9: mod_base = OTHER; note = 2' Fluoro-cytidine
  modified_base 10: mod_base = OTHER; note = 2'O-methyl-adenosine
  modified_base 11: mod_base = OTHER; note = 2' Fluoro-cytidine
  modified_base 12: mod_base = OTHER; note = 2'O-methyl-adenosine
  modified_base 13: mod_base = OTHER; note = Af
  modified_base 14: mod_base = gm
  modified_base 15: mod_base = OTHER; note = 2' Fluoro-guanosine
  modified_base 16: mod_base = OTHER; note = 2'O-methyl-adenosine
  modified_base 17: mod_base = OTHER; note = 2' Fluoro-uridine
  modified_base 18: mod_base = um
  modified_base 19: mod_base = OTHER; note = 2' Fluoro-uridine
  misc_feature 1^2: note = phosphorothioate linkage
  misc_feature 2^3: note = phosphorothioate linkage
ccttcatccacaaggattt

SEQ ID NO: 663 - RNA, 19 nt, synthetic construct
  source 1..19: mol_type = other RNA
  misc_feature 1..19: note = Description: ZPI siRNA sense strand: ETXS833; corresponding to SEQ ID NO: 343
  modified_base 1: mod_base = OTHER; note = 2' Fluoro-cytidine
  modified_base 2: mod_base = gm
  modified_base 3: mod_base = OTHER; note = Af
  modified_base 4: mod_base = OTHER; note = 2'O-methyl-adenosine
  modified_base 5: mod_base = OTHER; note = Af
  modified_base 6: mod_base = gm
  modified_base 7: mod_base = OTHER; note = Af
  modified_base 8: mod_base = um
  modified_base 9: mod_base = OTHER; note = 2' Fluoro-cytidine
  modified_base 10: mod_base = um
  modified_base 11: mod_base = OTHER; note = 2' Fluoro-cytidine
  modified_base 12: mod_base = cm
  modified_base 13: mod_base = OTHER; note = Af
  modified_base 14: mod_base = um
  modified_base 15: mod_base = OTHER; note = 2' Fluoro-guanosine
  modified_base 16: mod_base = OTHER; note = 2'O-methyl-adenosine
  modified_base 17: mod_base = OTHER; note = 2' Fluoro-guanosine
  modified_base 18: mod_base = gm
  modified_base 19: mod_base = OTHER; note = 2' Fluoro-cytidine
  misc_feature 1^2: note = phosphorothioate linkage
  misc_feature 2^3: note = phosphorothioate linkage
cgaaagatctccatgaggc

SEQ ID NO: 664 - RNA, 19 nt, synthetic construct
  source 1..19: mol_type = other RNA
  misc_feature 1..19: note = Description: ZPI siRNA sense strand: ETXS835; corresponding to SEQ ID NO: 344
  modified_base 1: mod_base = OTHER; note = 2' Fluoro-uridine
  modified_base 2: mod_base = gm
  modified_base 3: mod_base = OTHER; note = 2' Fluoro-guanosine
  modified_base 4: mod_base = um
  modified_base 5: mod_base = OTHER; note = 2' Fluoro-guanosine
  modified_base 6: mod_base = gm
  modified_base 7: mod_base = OTHER; note = 2' Fluoro-uridine
  modified_base 8: mod_base = cm
  modified_base 9: mod_base = OTHER; note = 2' Fluoro-cytidine
  modified_base 10: mod_base = um
  modified_base 11: mod_base = OTHER; note = 2' Fluoro-cytidine
  modified_base 12: mod_base = OTHER; note = 2'O-methyl-adenosine
  modified_base 13: mod_base = OTHER; note = 2' Fluoro-uridine
  modified_base 14: mod_base = gm
  modified_base 15: mod_base = OTHER; note = 2' Fluoro-guanosine
  modified_base 16: mod_base = OTHER; note = 2'O-methyl-adenosine
  modified_base 17: mod_base = OTHER; note = 2' Fluoro-guanosine
  modified_base 18: mod_base = OTHER; note = 2'O-methyl-adenosine
  modified_base 19: mod_base = OTHER; note = Af
  misc_feature 1^2: note = phosphorothioate linkage
  misc_feature 2^3: note = phosphorothioate linkage
tggtggtcctcatggagaa

SEQ ID NO: 665 - RNA, 19 nt, synthetic construct
  source 1..19: mol_type = other RNA
  misc_feature 1..19: note = Description: ZPI siRNA sense strand: ETXS837; corresponding to SEQ ID NO: 345
  modified_base 1: mod_base = OTHER; note = 2' Fluoro-guanosine
  modified_base 2: mod_base = OTHER; note = 2'O-methyl-adenosine
  modified_base 3: mod_base = OTHER; note = Af
  modified_base 4: mod_base = OTHER; note = 2'O-methyl-adenosine
  modified_base 5: mod_base = OTHER; note = 2' Fluoro-guanosine
  modified_base 6: mod_base = OTHER; note = 2'O-methyl-adenosine
  modified_base 7: mod_base = OTHER; note = 2' Fluoro-uridine
  modified_base 8: mod_base = cm
  modified_base 9: mod_base = OTHER; note = 2' Fluoro-uridine
  modified_base 10: mod_base = cm
  modified_base 11: mod_base = OTHER; note = 2' Fluoro-cytidine
  modified_base 12: mod_base = OTHER; note = 2'O-methyl-adenosine
  modified_base 13: mod_base = OTHER; note = 2' Fluoro-uridine
  modified_base 14: mod_base = gm
  modified_base 15: mod_base = OTHER; note = Af
  modified_base 16: mod_base = gm
  modified_base 17: mod_base = OTHER; note = 2' Fluoro-guanosine
  modified_base 18: mod_base = cm
  modified_base 19: mod_base = OTHER; note = Af
  misc_feature 1^2: note = phosphorothioate linkage
  misc_feature 2^3: note = phosphorothioate linkage
gaaagatctccatgaggca

SEQ ID NO: 666 - RNA, 19 nt, synthetic construct
  source 1..19: mol_type = other RNA
  misc_feature 1..19: note = Description: ZPI siRNA sense strand: ETXS839; corresponding to SEQ ID NO: 346
  modified_base 1: mod_base = OTHER; note = Af
  modified_base 2: mod_base = um
  modified_base 3: mod_base = OTHER; note = 2' Fluoro-guanosine
  modified_base 4: mod_base = OTHER; note = 2'O-methyl-adenosine
  modified_base 5: mod_base = OTHER; note = 2' Fluoro-guanosine
  modified_base 6: mod_base = OTHER; note = 2'O-methyl-adenosine
  modified_base 7: mod_base = OTHER; note = 2' Fluoro-uridine
  modified_base 8: mod_base = gm
  modified_base 9: mod_base = OTHER; note = 2' Fluoro-cytidine
  modified_base 10: mod_base = OTHER; note = 2'O-methyl-adenosine
  modified_base 11: mod_base = OTHER; note = 2' Fluoro-uridine
  modified_base 12: mod_base = gm
  modified_base 13: mod_base = OTHER; note = Af
  modified_base 14: mod_base = gm
  modified_base 15: mod_base = OTHER; note = 2' Fluoro-cytidine
  modified_base 16: mod_base = um
  modified_base 17: mod_base = OTHER; note = 2' Fluoro-guanosine
  modified_base 18: mod_base = cm
  modified_base 19: mod_base = OTHER; note = 2' Fluoro-uridine
  misc_feature 1^2: note = phosphorothioate linkage
  misc_feature 2^3: note = phosphorothioate linkage
atgagatgcatgagctgct

SEQ ID NO: 667 - RNA, 19 nt, synthetic construct
  source 1..19: mol_type = other RNA
  misc_feature 1..19: note = Description: ZPI siRNA sense strand: ETXS841; corresponding to SEQ ID NO: 347
  modified_base 1: mod_base = OTHER; note = 2' Fluoro-uridine
  modified_base 2: mod_base = um
  modified_base 3: mod_base = OTHER; note = 2' Fluoro-guanosine
  modified_base 4: mod_base = OTHER; note = 2'O-methyl-adenosine
  modified_base 5: mod_base = OTHER; note = 2' Fluoro-uridine
  modified_base 6: mod_base = gm
  modified_base 7: mod_base = OTHER; note = Af
  modified_base 8: mod_base = gm
  modified_base 9: mod_base = OTHER; note = Af
  modified_base 10: mod_base = um
  modified_base 11: mod_base = OTHER; note = 2' Fluoro-uridine
  modified_base 12: mod_base = OTHER; note = 2'O-methyl-adenosine
  modified_base 13: mod_base = OTHER; note = Af
  modified_base 14: mod_base = um
  modified_base 15: mod_base = OTHER; note = 2' Fluoro-cytidine
  modified_base 16: mod_base = cm
  modified_base 17: mod_base = OTHER; note = 2' Fluoro-uridine
  modified_base 18: mod_base = gm
  modified_base 19: mod_base = OTHER; note = Af
  misc_feature 1^2: note = phosphorothioate linkage
  misc_feature 2^3: note = phosphorothioate linkage
ttgatgagattaatcctga

SEQ ID NO: 668 - RNA, 19 nt, synthetic construct
  source 1..19: mol_type = other RNA
  misc_feature 1..19: note = Description: ZPI siRNA sense strand: ETXS843; corresponding to SEQ ID NO: 348
  modified_base 1: mod_base = OTHER; note = Af
  modified_base 2: mod_base = gm
  modified_base 3: mod_base = OTHER; note = Af
  modified_base 4: mod_base = um
  modified_base 5: mod_base = OTHER; note = 2' Fluoro-uridine
  modified_base 6: mod_base = OTHER; note = 2'O-methyl-adenosine
  modified_base 7: mod_base = OTHER; note = Af
  modified_base 8: mod_base = um
  modified_base 9: mod_base = OTHER; note = 2' Fluoro-cytidine
  modified_base 10: mod_base = cm
  modified_base 11: mod_base = OTHER; note = 2' Fluoro-uridine
  modified_base 12: mod_base = gm
  modified_base 13: mod_base = OTHER; note = Af
  modified_base 14: mod_base = OTHER; note = 2'O-methyl-adenosine
  modified_base 15: mod_base = OTHER; note = Af
  modified_base 16: mod_base = cm
  modified_base 17: mod_base = OTHER; note = 2' Fluoro-cytidine
  modified_base 18: mod_base = OTHER; note = 2'O-methyl-adenosine
  modified_base 19: mod_base = OTHER; note = Af
  misc_feature 1^2: note = phosphorothioate linkage
  misc_feature 2^3: note = phosphorothioate linkage
agattaatcctgaaaccaa

SEQ ID NO: 669 - RNA, 19 nt, synthetic construct
  source 1..19: mol_type = other RNA
  misc_feature 1..19: note = Description: ZPI siRNA sense strand: ETXS845; corresponding to SEQ ID NO: 349
  modified_base 1: mod_base = OTHER; note = Af
  modified_base 2: mod_base = um
  modified_base 3: mod_base = OTHER; note = 2' Fluoro-guanosine
  modified_base 4: mod_base = OTHER; note = 2'O-methyl-adenosine
  modified_base 5: mod_base = OTHER; note = 2' Fluoro-guanosine
  modified_base 6: mod_base = OTHER; note = 2'O-methyl-adenosine
  modified_base 7: mod_base = OTHER; note = 2' Fluoro-uridine
  modified_base 8: mod_base = um
  modified_base 9: mod_base = OTHER; note = Af
  modified_base 10: mod_base = OTHER; note = 2'O-methyl-adenosine
  modified_base 11: mod_base = OTHER; note = 2' Fluoro-uridine
  modified_base 12: mod_base = cm
  modified_base 13: mod_base = OTHER; note = 2' Fluoro-cytidine
  modified_base 14: mod_base = um
  modified_base 15: mod_base = OTHER; note = 2' Fluoro-guanosine
  modified_base 16: mod_base = OTHER; note = 2'O-methyl-adenosine
  modified_base 17: mod_base = OTHER; note = Af
  modified_base 18: mod_base = OTHER; note = 2'O-methyl-adenosine
  modified_base 19: mod_base = OTHER; note = 2' Fluoro-cytidine
  misc_feature 1^2: note = phosphorothioate linkage
  misc_feature 2^3: note = phosphorothioate linkage
atgagattaatcctgaaac

SEQ ID NO: 670 - RNA, 19 nt, synthetic construct
  source 1..19: mol_type = other RNA
  misc_feature 1..19: note = Description: ZPI siRNA sense strand: ETXS847; corresponding to SEQ ID NO: 350
  modified_base 1: mod_base = OTHER; note = 2' Fluoro-guanosine
  modified_base 2: mod_base = OTHER; note = 2'O-methyl-adenosine
  modified_base 3: mod_base = OTHER; note = 2' Fluoro-guanosine
  modified_base 4: mod_base = OTHER; note = 2'O-methyl-adenosine
  modified_base 5: mod_base = OTHER; note = 2' Fluoro-uridine
  modified_base 6: mod_base = um
  modified_base 7: mod_base = OTHER; note = Af
  modified_base 8: mod_base = OTHER; note = 2'O-methyl-adenosine
  modified_base 9: mod_base = OTHER; note = 2' Fluoro-uridine
  modified_base 10: mod_base = cm
  modified_base 11: mod_base = OTHER; note = 2' Fluoro-cytidine
  modified_base 12: mod_base = um
  modified_base 13: mod_base = OTHER; note = 2' Fluoro-guanosine
  modified_base 14: mod_base = OTHER; note = 2'O-methyl-adenosine
  modified_base 15: mod_base = OTHER; note = Af
  modified_base 16: mod_base = OTHER; note = 2'O-methyl-adenosine
  modified_base 17: mod_base = OTHER; note = 2' Fluoro-cytidine
  modified_base 18: mod_base = cm
  modified_base 19: mod_base = OTHER; note = Af
  misc_feature 1^2: note = phosphorothioate linkage
  misc_feature 2^3: note = phosphorothioate linkage
gagattaatcctgaaacca

SEQ ID NO: 671 - RNA, 19 nt, synthetic construct
  source 1..19: mol_type = other RNA
  misc_feature 1..19: note = Description: ZPI siRNA sense strand: ETXS849; corresponding to SEQ ID NO: 351
  modified_base 1: mod_base = OTHER; note = 2' Fluoro-uridine
  modified_base 2: mod_base = gm
  modified_base 3: mod_base = OTHER; note = Af
  modified_base 4: mod_base = gm
  modified_base 5: mod_base = OTHER; note = Af
  modified_base 6: mod_base = um
  modified_base 7: mod_base = OTHER; note = 2' Fluoro-uridine
  modified_base 8: mod_base = OTHER; note = 2'O-methyl-adenosine
  modified_base 9: mod_base = OTHER; note = Af
  modified_base 10: mod_base = um
  modified_base 11: mod_base = OTHER; note = 2' Fluoro-cytidine
  modified_base 12: mod_base = cm
  modified_base 13: mod_base = OTHER; note = 2' Fluoro-uridine
  modified_base 14: mod_base = gm
  modified_base 15: mod_base = OTHER; note = Af
  modified_base 16: mod_base = OTHER; note = 2'O-methyl-adenosine
  modified_base 17: mod_base = OTHER; note = Af
  modified_base 18: mod_base = cm
  modified_base 19: mod_base = OTHER; note = 2' Fluoro-cytidine
  misc_feature 1^2: note = phosphorothioate linkage
  misc_feature 2^3: note = phosphorothioate linkage
tgagattaatcctgaaacc

SEQ ID NO: 672 - RNA, 19 nt, synthetic construct
  source 1..19: mol_type = other RNA
  misc_feature 1..19: note = Description: ZPI siRNA sense strand: ETXS851; corresponding to SEQ ID NO: 352
  modified_base 1: mod_base = OTHER; note = 2' Fluoro-guanosine
  modified_base 2: mod_base = um
  modified_base 3: mod_base = OTHER; note = 2' Fluoro-uridine
  modified_base 4: mod_base = um
  modified_base 5: mod_base = OTHER; note = 2' Fluoro-guanosine
  modified_base 6: mod_base = OTHER; note = 2'O-methyl-adenosine
  modified_base 7: mod_base = OTHER; note = 2' Fluoro-uridine
  modified_base 8: mod_base = gm
  modified_base 9: mod_base = OTHER; note = Af
  modified_base 10: mod_base = gm
  modified_base 11: mod_base = OTHER; note = Af
  modified_base 12: mod_base = um
  modified_base 13: mod_base = OTHER; note = 2' Fluoro-uridine
  modified_base 14: mod_base = OTHER; note = 2'O-methyl-adenosine
  modified_base 15: mod_base = OTHER; note = Af
  modified_base 16: mod_base = um
  modified_base 17: mod_base = OTHER; note = 2' Fluoro-cytidine
  modified_base 18: mod_base = cm
  modified_base 19: mod_base = OTHER; note = 2' Fluoro-uridine
  misc_feature 1^2: note = phosphorothioate linkage
  misc_feature 2^3: note = phosphorothioate linkage
gtttgatgagattaatcct

SEQ ID NO: 673 - RNA, 19 nt, synthetic construct
  source 1..19: mol_type = other RNA
  misc_feature 1..19: note = Description: ZPI siRNA sense strand: ETXS853; corresponding to SEQ ID NO: 353
  modified_base 1: mod_base = OTHER; note = 2' Fluoro-uridine
  modified_base 2: mod_base = um
  modified_base 3: mod_base = OTHER; note = 2' Fluoro-guanosine
  modified_base 4: mod_base = cm
  modified_base 5: mod_base = OTHER; note = 2' Fluoro-cytidine
  modified_base 6: mod_base = um
  modified_base 7: mod_base = OTHER; note = 2' Fluoro-uridine
  modified_base 8: mod_base = cm
  modified_base 9: mod_base = OTHER; note = Af
  modified_base 10: mod_base = um
  modified_base 11: mod_base = OTHER; note = 2' Fluoro-cytidine
  modified_base 12: mod_base = cm
  modified_base 13: mod_base = OTHER; note = Af
  modified_base 14: mod_base = cm
  modified_base 15: mod_base = OTHER; note = Af
  modified_base 16: mod_base = OTHER; note = 2'O-methyl-adenosine
  modified_base 17: mod_base = OTHER; note = 2' Fluoro-guanosine
  modified_base 18: mod_base = gm
  modified_base 19: mod_base = OTHER; note = Af
  misc_feature 1^2: note = phosphorothioate linkage
  misc_feature 2^3: note = phosphorothioate linkage
ttgccttcatccacaagga

SEQ ID NO: 674 - RNA, 19 nt, synthetic construct
  source 1..19: mol_type = other RNA
  misc_feature 1..19: note = Description: ZPI siRNA sense strand: ETXS855; corresponding to SEQ ID NO: 354
  modified_base 1: mod_base = OTHER; note = Af
  modified_base 2: mod_base = OTHER; note = 2'O-methyl-adenosine
  modified_base 3: mod_base = OTHER; note = Af
  modified_base 4: mod_base = gm
  modified_base 5: mod_base = OTHER; note = Af
  modified_base 6: mod_base = um
  modified_base 7: mod_base = OTHER; note = 2' Fluoro-cytidine
  modified_base 8: mod_base = um
  modified_base 9: mod_base = OTHER; note = 2' Fluoro-cytidine
  modified_base 10: mod_base = cm
  modified_base 11: mod_base = OTHER; note = Af
  modified_base 12: mod_base = um
  modified_base 13: mod_base = OTHER; note = 2' Fluoro-guanosine
  modified_base 14: mod_base = OTHER; note = 2'O-methyl-adenosine
  modified_base 15: mod_base = OTHER; note = 2' Fluoro-guanosine
  modified_base 16: mod_base = gm
  modified_base 17: mod_base = OTHER; note = 2' Fluoro-cytidine
  modified_base 18: mod_base = OTHER; note = 2'O-methyl-adenosine
  modified_base 19: mod_base = OTHER; note = 2' Fluoro-cytidine
  misc_feature 1^2: note = phosphorothioate linkage
  misc_feature 2^3: note = phosphorothioate linkage
aaagatctccatgaggcac

SEQ ID NO: 675 - RNA, 19 nt, synthetic construct
  source 1..19: mol_type = other RNA
  misc_feature 1..19: note = Description: ZPI siRNA sense strand: ETXS857; corresponding to SEQ ID NO: 355
  modified_base 1: mod_base = OTHER; note = 2' Fluoro-cytidine
  modified_base 2: mod_base = um
  modified_base 3: mod_base = OTHER; note = 2' Fluoro-guanosine
  modified_base 4: mod_base = gm
  modified_base 5: mod_base = OTHER; note = 2' Fluoro-uridine
  modified_base 6: mod_base = gm
  modified_base 7: mod_base = OTHER; note = 2' Fluoro-guanosine
  modified_base 8: mod_base = um
  modified_base 9: mod_base = OTHER; note = 2' Fluoro-cytidine
  modified_base 10: mod_base = cm
  modified_base 11: mod_base = OTHER; note = 2' Fluoro-uridine
  modified_base 12: mod_base = cm
  modified_base 13: mod_base = OTHER; note = Af
  modified_base 14: mod_base = um
  modified_base 15: mod_base = OTHER; note = 2' Fluoro-guanosine
  modified_base 16: mod_base = gm
  modified_base 17: mod_base = OTHER; note = Af
  modified_base 18: mod_base = gm
  modified_base 19: mod_base = OTHER; note = Af
  misc_feature 1^2: note = phosphorothioate linkage
  misc_feature 2^3: note = phosphorothioate linkage
ctggtggtcctcatggaga

SEQ ID NO: 676 - RNA, 19 nt, synthetic construct
  source 1..19: mol_type = other RNA
  misc_feature 1..19: note = Description: ZPI siRNA sense strand: ETXS859; corresponding to SEQ ID NO: 356
  modified_base 1: mod_base = OTHER; note = 2' Fluoro-uridine
  modified_base 2: mod_base = um
  modified_base 3: mod_base = OTHER; note = 2' Fluoro-cytidine
  modified_base 4: mod_base = OTHER; note = 2'O-methyl-adenosine
  modified_base 5: mod_base = OTHER; note = 2' Fluoro-uridine
  modified_base 6: mod_base = cm
  modified_base 7: mod_base = OTHER; note = 2' Fluoro-cytidine
  modified_base 8: mod_base = OTHER; note = 2'O-methyl-adenosine
  modified_base 9: mod_base = OTHER; note = 2' Fluoro-cytidine
  modified_base 10: mod_base = OTHER; note = 2'O-methyl-adenosine
  modified_base 11: mod_base = OTHER; note = Af
  modified_base 12: mod_base = gm
  modified_base 13: mod_base = OTHER; note = 2' Fluoro-guanosine
  modified_base 14: mod_base = OTHER; note = 2'O-methyl-adenosine
  modified_base 15: mod_base = OTHER; note = 2' Fluoro-uridine
  modified_base 16: mod_base = um
  modified_base 17: mod_base = OTHER; note = 2' Fluoro-uridine
  modified_base 18: mod_base = um
  modified_base 19: mod_base = OTHER; note = 2' Fluoro-guanosine
  misc_feature 1^2: note = phosphorothioate linkage
  misc_feature 2^3: note = phosphorothioate linkage
ttcatccacaaggattttg

SEQ ID NO: 677 - RNA, 19 nt, synthetic construct
  source 1..19: mol_type = other RNA
  misc_feature 1..19: note = Description: ZPI siRNA sense strand: ETXS861; corresponding to SEQ ID NO: 357
  modified_base 1: mod_base = OTHER; note = Af
  modified_base 2: mod_base = OTHER; note = 2'O-methyl-adenosine
  modified_base 3: mod_base = OTHER; note = 2' Fluoro-guanosine
  modified_base 4: mod_base = OTHER; note = 2'O-methyl-adenosine
  modified_base 5: mod_base = OTHER; note = 2' Fluoro-uridine
  modified_base 6: mod_base = cm
  modified_base 7: mod_base = OTHER; note = 2' Fluoro-uridine
  modified_base 8: mod_base = cm
  modified_base 9: mod_base = OTHER; note = 2' Fluoro-cytidine
  modified_base 10: mod_base = OTHER; note = 2'O-methyl-adenosine
  modified_base 11: mod_base = OTHER; note = 2' Fluoro-uridine
  modified_base 12: mod_base = gm
  modified_base 13: mod_base = OTHER; note = Af
  modified_base 14: mod_base = gm
  modified_base 15: mod_base = OTHER; note = 2' Fluoro-guanosine
  modified_base 16: mod_base = cm
  modified_base 17: mod_base = OTHER; note = Af
  modified_base 18: mod_base = cm
  modified_base 19: mod_base = OTHER; note = 2' Fluoro-guanosine
  misc_feature 1^2: note = phosphorothioate linkage
  misc_feature 2^3: note = phosphorothioate linkage
aagatctccatgaggcacg

SEQ ID NO: 678 - RNA, 19 nt, synthetic construct
  source 1..19: mol_type = other RNA
  misc_feature 1..19: note = Description: ZPI siRNA sense strand: ETXS863; corresponding to SEQ ID NO: 358
  modified_base 1: mod_base = OTHER; note = 2' Fluoro-cytidine
  modified_base 2: mod_base = OTHER; note = 2'O-methyl-adenosine
  modified_base 3: mod_base = OTHER; note = 2' Fluoro-uridine
  modified_base 4: mod_base = cm
  modified_base 5: mod_base = OTHER; note = 2' Fluoro-cytidine
  modified_base 6: mod_base = OTHER; note = 2'O-methyl-adenosine
  modified_base 7: mod_base = OTHER; note = 2' Fluoro-cytidine
  modified_base 8: mod_base = OTHER; note = 2'O-methyl-adenosine
  modified_base 9: mod_base = OTHER; note = Af
  modified_base 10: mod_base = gm
  modified_base 11: mod_base = OTHER; note = 2' Fluoro-guanosine
  modified_base 12: mod_base = OTHER; note = 2'O-methyl-adenosine
  modified_base 13: mod_base = OTHER; note = 2' Fluoro-uridine
  modified_base 14: mod_base = um
  modified_base 15: mod_base = OTHER; note = 2' Fluoro-uridine
  modified_base 16: mod_base = um
  modified_base 17: mod_base = OTHER; note = 2' Fluoro-guanosine
  modified_base 18: mod_base = OTHER; note = 2'O-methyl-adenosine
  modified_base 19: mod_base = OTHER; note = 2' Fluoro-uridine
  misc_feature 1^2: note = phosphorothioate linkage
  misc_feature 2^3: note = phosphorothioate linkage
catccacaaggattttgat

SEQ ID NO: 679 - RNA, 19 nt, synthetic construct
  source 1..19: mol_type = other RNA
  misc_feature 1..19: note = Description: ZPI siRNA sense strand: ETXS865; corresponding to SEQ ID NO: 359
  modified_base 1: mod_base = OTHER; note = 2' Fluoro-uridine
  modified_base 2: mod_base = gm
  modified_base 3: mod_base = OTHER; note = Af
  modified_base 4: mod_base = um
  modified_base 5: mod_base = OTHER; note = 2' Fluoro-guanosine
  modified_base 6: mod_base = OTHER; note = 2'O-methyl-adenosine
  modified_base 7: mod_base = OTHER; note = 2' Fluoro-guanosine
  modified_base 8: mod_base = OTHER; note = 2'O-methyl-adenosine
  modified_base 9: mod_base = OTHER; note = 2' Fluoro-uridine
  modified_base 10: mod_base = um
  modified_base 11: mod_base = OTHER; note = Af
  modified_base 12: mod_base = OTHER; note = 2'O-methyl-adenosine
  modified_base 13: mod_base = OTHER; note = 2' Fluoro-uridine
  modified_base 14: mod_base = cm
  modified_base 15: mod_base = OTHER; note = 2' Fluoro-cytidine
  modified_base 16: mod_base = um
  modified_base 17: mod_base = OTHER; note = 2' Fluoro-guanosine
  modified_base 18: mod_base = OTHER; note = 2'O-methyl-adenosine
  modified_base 19: mod_base = OTHER; note = Af
  misc_feature 1^2: note = phosphorothioate linkage
  misc_feature 2^3: note = phosphorothioate linkage
tgatgagattaatcctgaa

SEQ ID NO: 680 - RNA, 19 nt, synthetic construct
  source 1..19: mol_type = other RNA
  misc_feature 1..19: note = Description: ZPI siRNA sense strand: ETXS867; corresponding to SEQ ID NO: 360
  modified_base 1: mod_base = OTHER; note = 2' Fluoro-guanosine
  modified_base 2: mod_base = cm
  modified_base 3: mod_base = OTHER; note = 2' Fluoro-cytidine
  modified_base 4: mod_base = um
  modified_base 5: mod_base = OTHER; note = 2' Fluoro-uridine
  modified_base 6: mod_base = cm
  modified_base 7: mod_base = OTHER; note = Af
  modified_base 8: mod_base = um
  modified_base 9: mod_base = OTHER; note = 2' Fluoro-cytidine
  modified_base 10: mod_base = cm
  modified_base 11: mod_base = OTHER; note = Af
  modified_base 12: mod_base = cm
  modified_base 13: mod_base = OTHER; note = Af
  modified_base 14: mod_base = OTHER; note = 2'O-methyl-adenosine
  modified_base 15: mod_base = OTHER; note = 2' Fluoro-guanosine
  modified_base 16: mod_base = gm
  modified_base 17: mod_base = OTHER; note = Af
  modified_base 18: mod_base = um
  modified_base 19: mod_base = OTHER; note = 2' Fluoro-uridine
  misc_feature 1^2: note = phosphorothioate linkage
  misc_feature 2^3: note = phosphorothioate linkage
gccttcatccacaaggatt

SEQ ID NO: 681 - RNA, 19 nt, synthetic construct
  source 1..19: mol_type = other RNA
  misc_feature 1..19: note = Description: ZPI siRNA sense strand: ETXS869; corresponding to SEQ ID NO: 361
  modified_base 1: mod_base = OTHER; note = 2' Fluoro-uridine
  modified_base 2: mod_base = cm
  modified_base 3: mod_base = OTHER; note = 2' Fluoro-uridine
  modified_base 4: mod_base = cm
  modified_base 5: mod_base = OTHER; note = 2' Fluoro-cytidine
  modified_base 6: mod_base = OTHER; note = 2'O-methyl-adenosine
  modified_base 7: mod_base = OTHER; note = 2' Fluoro-uridine
  modified_base 8: mod_base = gm
  modified_base 9: mod_base = OTHER; note = Af
  modified_base 10: mod_base = gm
  modified_base 11: mod_base = OTHER; note = 2' Fluoro-guanosine
  modified_base 12: mod_base = cm
  modified_base 13: mod_base = OTHER; note = Af
  modified_base 14: mod_base = cm
  modified_base 15: mod_base = OTHER; note = 2' Fluoro-guanosine
  modified_base 16: mod_base = OTHER; note = 2'O-methyl-adenosine
  modified_base 17: mod_base = OTHER; note = 2' Fluoro-uridine
  modified_base 18: mod_base = gm
  modified_base 19: mod_base = OTHER; note = 2' Fluoro-guanosine
  misc_feature 1^2: note = phosphorothioate linkage
  misc_feature 2^3: note = phosphorothioate linkage
tctccatgaggcacgatgg

SEQ ID NO: 682 - RNA, 21 nt, synthetic construct
  source 1..21: mol_type = other RNA
  misc_feature 1..21: note = Description: ZPI siRNA sense strand: ETXS871; corresponding to SEQ ID NO: 242
  modified_base 1: mod_base = um
  modified_base 2: mod_base = gm
  modified_base 3: mod_base = cm
  modified_base 4: mod_base = cm
  modified_base 5: mod_base = um
  modified_base 6: mod_base = um
  modified_base 7: mod_base = OTHER; note = 2' Fluoro-cytidine
  modified_base 8: mod_base = OTHER; note = Af
  modified_base 9: mod_base = OTHER; note = 2' Fluoro-uridine
  modified_base 10: mod_base = OTHER; note = 2' Fluoro-cytidine
  modified_base 11: mod_base = OTHER; note = 2' Fluoro-cytidine
  modified_base 12: mod_base = OTHER; note = 2'O-methyl-adenosine
  modified_base 13: mod_base = cm
  modified_base 14: mod_base = OTHER; note = 2'O-methyl-adenosine
  modified_base 15: mod_base = OTHER; note = 2'O-methyl-adenosine
  modified_base 16: mod_base = gm
  modified_base 17: mod_base = gm
  modified_base 18: mod_base = OTHER; note = 2'O-methyl-adenosine
  modified_base 19: mod_base = OTHER; note = 2' Fluoro-uridine
  modified_base 20: mod_base = um
  modified_base 21: mod_base = um
  misc_feature 1^2: note = phosphorothioate linkage
  misc_feature 2^3: note = phosphorothioate linkage
tgccttcatccacaaggattt

SEQ ID NO: 683 - RNA, 21 nt, synthetic construct
  source 1..21: mol_type = other RNA
  misc_feature 1..21: note = Description: ZPI siRNA sense strand: ETXS873; corresponding to SEQ ID NO: 243
  modified_base 1: mod_base = um
  modified_base 2: mod_base = gm
  modified_base 3: mod_base = cm
  modified_base 4: mod_base = gm
  modified_base 5: mod_base = OTHER; note = 2'O-methyl-adenosine
  modified_base 6: mod_base = OTHER; note = 2'O-methyl-adenosine
  modified_base 7: mod_base = OTHER; note = Af
  modified_base 8: mod_base = OTHER; note = 2' Fluoro-guanosine
  modified_base 9: mod_base = OTHER; note = Af
  modified_base 10: mod_base = OTHER; note = 2' Fluoro-uridine
  modified_base 11: mod_base = OTHER; note = 2' Fluoro-cytidine
  modified_base 12: mod_base = um
  modified_base 13: mod_base = cm
  modified_base 14: mod_base = cm
  modified_base 15: mod_base = OTHER; note = 2'O-methyl-adenosine
  modified_base 16: mod_base = um
  modified_base 17: mod_base = gm
  modified_base 18: mod_base = OTHER; note = 2'O-methyl-adenosine
  modified_base 19: mod_base = OTHER; note = 2' Fluoro-guanosine
  modified_base 20: mod_base = gm
  modified_base 21: mod_base = cm
  misc_feature 1^2: note = phosphorothioate linkage
  misc_feature 2^3: note = phosphorothioate linkage
tgcgaaagatctccatgaggc

SEQ ID NO: 684 - RNA, 21 nt, synthetic construct
  source 1..21: mol_type = other RNA
  misc_feature 1..21: note = Description: ZPI siRNA sense strand: ETXS875; corresponding to SEQ ID NO: 244
  modified_base 1: mod_base = gm
  modified_base 2: mod_base = cm
  modified_base 3: mod_base = um
  modified_base 4: mod_base = gm
  modified_base 5: mod_base = gm
  modified_base 6: mod_base = um
  modified_base 7: mod_base = OTHER; note = 2' Fluoro-guanosine
  modified_base 8: mod_base = OTHER; note = 2' Fluoro-guanosine
  modified_base 9: mod_base = OTHER; note = 2' Fluoro-uridine
  modified_base 10: mod_base = OTHER; note = 2' Fluoro-cytidine
  modified_base 11: mod_base = OTHER; note = 2' Fluoro-cytidine
  modified_base 12: mod_base = um
  modified_base 13: mod_base = cm
  modified_base 14: mod_base = OTHER; note = 2'O-methyl-adenosine
  modified_base 15: mod_base = um
  modified_base 16: mod_base = gm
  modified_base 17: mod_base = gm
  modified_base 18: mod_base = OTHER; note = 2'O-methyl-adenosine
  modified_base 19: mod_base = OTHER; note = 2' Fluoro-guanosine
  modified_base 20: mod_base = OTHER; note = 2'O-methyl-adenosine
  modified_base 21: mod_base = OTHER; note = 2'O-methyl-adenosine
  misc_feature 1^2: note = phosphorothioate linkage
  misc_feature 2^3: note = phosphorothioate linkage
gctggtggtcctcatggagaa

SEQ ID NO: 685 - RNA, 21 nt, synthetic construct
  source 1..21: mol_type = other RNA
  misc_feature 1..21: note = Description: ZPI siRNA sense strand: ETXS877; corresponding to SEQ ID NO: 245
  modified_base 1: mod_base = gm
  modified_base 2: mod_base = cm
  modified_base 3: mod_base = gm
  modified_base 4: mod_base = OTHER; note = 2'O-methyl-adenosine
  modified_base 5: mod_base = OTHER; note = 2'O-methyl-adenosine
  modified_base 6: mod_base = OTHER; note = 2'O-methyl-adenosine
  modified_base 7: mod_base = OTHER; note = 2' Fluoro-guanosine
  modified_base 8: mod_base = OTHER; note = Af
  modified_base 9: mod_base = OTHER; note = 2' Fluoro-uridine
  modified_base 10: mod_base = OTHER; note = 2' Fluoro-cytidine
  modified_base 11: mod_base = OTHER; note = 2' Fluoro-uridine
  modified_base 12: mod_base = cm
  modified_base 13: mod_base = cm
  modified_base 14: mod_base = OTHER; note = 2'O-methyl-adenosine
  modified_base 15: mod_base = um
  modified_base 16: mod_base = gm
  modified_base 17: mod_base = OTHER; note = 2'O-methyl-adenosine
  modified_base 18: mod_base = gm
  modified_base 19: mod_base = OTHER; note = 2' Fluoro-guanosine
  modified_base 20: mod_base = cm
  modified_base 21: mod_base = OTHER; note = 2'O-methyl-adenosine
  misc_feature 1^2: note = phosphorothioate linkage
  misc_feature 2^3: note = phosphorothioate linkage
gcgaaagatctccatgaggca

SEQ ID NO: 686 - RNA, 21 nt, synthetic construct
  source 1..21: mol_type = other RNA
  misc_feature 1..21: note = Description: ZPI siRNA sense strand: ETXS879; corresponding to SEQ ID NO: 246
  modified_base 1: mod_base = gm
  modified_base 2: mod_base = um
  modified_base 3: mod_base = OTHER; note = 2'O-methyl-adenosine
  modified_base 4: mod_base = um
  modified_base 5: mod_base = gm
  modified_base 6: mod_base = OTHER; note = 2'O-methyl-adenosine
  modified_base 7: mod_base = OTHER; note = 2' Fluoro-guanosine
  modified_base 8: mod_base = OTHER; note = Af
  modified_base 9: mod_base = OTHER; note = 2' Fluoro-uridine
  modified_base 10: mod_base = OTHER; note = 2' Fluoro-guanosine
  modified_base 11: mod_base = OTHER; note = 2' Fluoro-cytidine
  modified_base 12: mod_base = OTHER; note = 2'O-methyl-adenosine
  modified_base 13: mod_base = um
  modified_base 14: mod_base = gm
  modified_base 15: mod_base = OTHER; note = 2'O-methyl-adenosine
  modified_base 16: mod_base = gm
  modified_base 17: mod_base = cm
  modified_base 18: mod_base = um
  modified_base 19: mod_base = OTHER; note = 2' Fluoro-guanosine
  modified_base 20: mod_base = cm
  modified_base 21: mod_base = um
  misc_feature 1^2: note = phosphorothioate linkage
  misc_feature 2^3: note = phosphorothioate linkage
gtatgagatgcatgagctgct

SEQ ID NO: 687 - RNA, 21 nt, synthetic construct
  source 1..21: mol_type = other RNA
  misc_feature 1..21: note = Description: ZPI siRNA sense strand: ETXS881; corresponding to SEQ ID NO: 247
  modified_base 1: mod_base = gm
  modified_base 2: mod_base = um
  modified_base 3: mod_base = um
  modified_base 4: mod_base = um
  modified_base 5: mod_base = gm
  modified_base 6: mod_base = OTHER; note = 2'O-methyl-adenosine
  modified_base 7: mod_base = OTHER; note = 2' Fluoro-uridine
  modified_base 8: mod_base = OTHER; note = 2' Fluoro-guanosine
  modified_base 9: mod_base = OTHER; note = Af
  modified_base 10: mod_base = OTHER; note = 2' Fluoro-guanosine
  modified_base 11: mod_base = OTHER; note = Af
  modified_base 12: mod_base = um
  modified_base 13: mod_base = um
  modified_base 14: mod_base = OTHER; note = 2'O-methyl-adenosine
  modified_base 15: mod_base = OTHER; note = 2'O-methyl-adenosine
  modified_base 16: mod_base = um
  modified_base 17: mod_base = cm
  modified_base 18: mod_base = cm
  modified_base 19: mod_base = OTHER; note = 2' Fluoro-uridine
  modified_base 20: mod_base = gm
  modified_base 21: mod_base = OTHER; note = 2'O-methyl-adenosine
  misc_feature 1^2: note = phosphorothioate linkage
  misc_feature 2^3: note = phosphorothioate linkage
gtttgatgagattaatcctga

SEQ ID NO: 688 - RNA, 21 nt, synthetic construct
  source 1..21: mol_type = other RNA
  misc_feature 1..21: note = Description: ZPI siRNA sense strand: ETXS883; corresponding to SEQ ID NO: 248
  modified_base 1: mod_base = um
  modified_base 2: mod_base = gm
  modified_base 3: mod_base = OTHER; note = 2'O-methyl-adenosine
  modified_base 4: mod_base = gm
  modified_base 5: mod_base = OTHER; note = 2'O-methyl-adenosine
  modified_base 6: mod_base = um
  modified_base 7: mod_base = OTHER; note = 2' Fluoro-uridine
  modified_base 8: mod_base = OTHER; note = Af
  modified_base 9: mod_base = OTHER; note = Af
  modified_base 10: mod_base = OTHER; note = 2' Fluoro-uridine
  modified_base 11: mod_base = OTHER; note = 2' Fluoro-cytidine
  modified_base 12: mod_base = cm
  modified_base 13: mod_base = um
  modified_base 14: mod_base = gm
  modified_base 15: mod_base = OTHER; note = 2'O-methyl-adenosine
  modified_base 16: mod_base = OTHER; note = 2'O-methyl-adenosine
  modified_base 17: mod_base = OTHER; note = 2'O-methyl-adenosine
  modified_base 18: mod_base = cm
  modified_base 19: mod_base = OTHER; note = 2' Fluoro-cytidine
  modified_base 20: mod_base = OTHER; note = 2'O-methyl-adenosine
  modified_base 21: mod_base = OTHER; note = 2'O-methyl-adenosine
  misc_feature 1^2: note = phosphorothioate linkage
  misc_feature 2^3: note = phosphorothioate linkage
tgagattaatcctgaaaccaa

SEQ ID NO: 689 - RNA, 21 nt, synthetic construct
  source 1..21: mol_type = other RNA
  misc_feature 1..21: note = Description: ZPI siRNA sense strand: ETXS885; corresponding to SEQ ID NO: 249
  modified_base 1: mod_base = um
  modified_base 2: mod_base = gm
  modified_base 3: mod_base = OTHER; note = 2'O-methyl-adenosine
  modified_base 4: mod_base = um
  modified_base 5: mod_base = gm
  modified_base 6: mod_base = OTHER; note = 2'O-methyl-adenosine
  modified_base 7: mod_base = OTHER; note = 2' Fluoro-guanosine
  modified_base 8: mod_base = OTHER; note = Af
  modified_base 9: mod_base = OTHER; note = 2' Fluoro-uridine
  modified_base 10: mod_base = OTHER; note = 2' Fluoro-uridine
  modified_base 11: mod_base = OTHER; note = Af
  modified_base 12: mod_base = OTHER; note = 2'O-methyl-adenosine
  modified_base 13: mod_base = um
  modified_base 14: mod_base = cm
  modified_base 15: mod_base = cm
  modified_base 16: mod_base = um
  modified_base 17: mod_base = gm
  modified_base 18: mod_base = OTHER; note = 2'O-methyl-adenosine
  modified_base 19: mod_base = OTHER; note = Af
  modified_base 20: mod_base = OTHER; note = 2'O-methyl-adenosine
  modified_base 21: mod_base = cm
  misc_feature 1^2: note = phosphorothioate linkage
  misc_feature 2^3: note = phosphorothioate linkage
tgatgagattaatcctgaaac

SEQ ID NO: 690 - RNA, 21 nt, synthetic construct
  source 1..21: mol_type = other RNA
  misc_feature 1..21: note = Description: ZPI siRNA sense strand: ETXS887; corresponding to SEQ ID NO: 250
  modified_base 1: mod_base = OTHER; note = 2'O-methyl-adenosine
  modified_base 2: mod_base = um
  modified_base 3: mod_base = gm
  modified_base 4: mod_base = OTHER; note = 2'O-methyl-adenosine
  modified_base 5: mod_base = gm
  modified_base 6: mod_base = OTHER; note = 2'O-methyl-adenosine
  modified_base 7: mod_base = OTHER; note = 2' Fluoro-uridine
  modified_base 8: mod_base = OTHER; note = 2' Fluoro-uridine
  modified_base 9: mod_base = OTHER; note = Af
  modified_base 10: mod_base = OTHER; note = Af
  modified_base 11: mod_base = OTHER; note = 2' Fluoro-uridine
  modified_base 12: mod_base = cm
  modified_base 13: mod_base = cm
  modified_base 14: mod_base = um
  modified_base 15: mod_base = gm
  modified_base 16: mod_base = OTHER; note = 2'O-methyl-adenosine
  modified_base 17: mod_base = OTHER; note = 2'O-methyl-adenosine
  modified_base 18: mod_base = OTHER; note = 2'O-methyl-adenosine
  modified_base 19: mod_base = OTHER; note = 2' Fluoro-cytidine
  modified_base 20: mod_base = cm
  modified_base 21: mod_base = OTHER; note = 2'O-methyl-adenosine
  misc_feature 1^2: note = phosphorothioate linkage
  misc_feature 2^3: note = phosphorothioate linkage
atgagattaatcctgaaacca

SEQ ID NO: 691 - RNA, 21 nt, synthetic construct
  source 1..21: mol_type = other RNA
  misc_feature 1..21: note = Description: ZPI siRNA sense strand: ETXS889; corresponding to SEQ ID NO: 251
  modified_base 1: mod_base = gm
  modified_base 2: mod_base = OTHER; note = 2'O-methyl-adenosine
  modified_base 3: mod_base = um
  modified_base 4: mod_base = gm
  modified_base 5: mod_base = OTHER; note = 2'O-methyl-adenosine
  modified_base 6: mod_base = gm
  modified_base 7: mod_base = OTHER; note = Af
  modified_base 8: mod_base = OTHER; note = 2' Fluoro-uridine
  modified_base 9: mod_base = OTHER; note = 2' Fluoro-uridine
  modified_base 10: mod_base = OTHER; note = Af
  modified_base 11: mod_base = OTHER; note = Af
  modified_base 12: mod_base = um
  modified_base 13: mod_base = cm
  modified_base 14: mod_base = cm
  modified_base 15: mod_base = um
  modified_base 16: mod_base = gm
  modified_base 17: mod_base = OTHER; note = 2'O-methyl-adenosine
  modified_base 18: mod_base = OTHER; note = 2'O-methyl-adenosine
  modified_base 19: mod_base = OTHER; note = Af
  modified_base 20: mod_base = cm
  modified_base 21: mod_base = cm
  misc_feature 1^2: note = phosphorothioate linkage
  misc_feature 2^3: note = phosphorothioate linkage
gatgagattaatcctgaaacc

SEQ ID NO: 692 - RNA, 21 nt, synthetic construct
  source 1..21: mol_type = other RNA
  misc_feature 1..21: note = Description: ZPI siRNA sense strand: ETXS891; corresponding to SEQ ID NO: 252
  modified_base 1: mod_base = cm
  modified_base 2: mod_base = um
  modified_base 3: mod_base = gm
  modified_base 4: mod_base = um
  modified_base 5: mod_base = um
  modified_base 6: mod_base = um
  modified_base 7: mod_base = OTHER; note = 2' Fluoro-guanosine
  modified_base 8: mod_base = OTHER; note = Af
  modified_base 9: mod_base = OTHER; note = 2' Fluoro-uridine
  modified_base 10: mod_base = OTHER; note = 2' Fluoro-guanosine
  modified_base 11: mod_base = OTHER; note = Af
  modified_base 12: mod_base = gm
  modified_base 13: mod_base = OTHER; note = 2'O-methyl-adenosine
  modified_base 14: mod_base = um
  modified_base 15: mod_base = um
  modified_base 16: mod_base = OTHER; note = 2'O-methyl-adenosine
  modified_base 17: mod_base = OTHER; note = 2'O-methyl-adenosine
  modified_base 18: mod_base = um
  modified_base 19: mod_base = OTHER; note = 2' Fluoro-cytidine
  modified_base 20: mod_base = cm
  modified_base 21: mod_base = um
  misc_feature 1^2: note = phosphorothioate linkage
  misc_feature 2^3: note = phosphorothioate linkage
ctgtttgatgagattaatcct

SEQ ID NO: 693 - RNA, 21 nt, synthetic construct
  source 1..21: mol_type = other RNA
  misc_feature 1..21: note = Description: ZPI siRNA sense strand: ETXS893; corresponding to SEQ ID NO: 253
  modified_base 1: mod_base = um
  modified_base 2: mod_base = um
  modified_base 3: mod_base = um
  modified_base 4: mod_base = um
  modified_base 5: mod_base = gm
  modified_base 6: mod_base = cm
  modified_base 7: mod_base = OTHER; note = 2' Fluoro-cytidine
  modified_base 8: mod_base = OTHER; note = 2' Fluoro-uridine
  modified_base 9: mod_base = OTHER; note = 2' Fluoro-uridine
  modified_base 10: mod_base = OTHER; note = 2' Fluoro-cytidine
  modified_base 11: mod_base = OTHER; note = Af
  modified_base 12: mod_base = um
  modified_base 13: mod_base = cm
  modified_base 14: mod_base = cm
  modified_base 15: mod_base = OTHER; note = 2'O-methyl-adenosine
  modified_base 16: mod_base = cm
  modified_base 17: mod_base = OTHER; note = 2'O-methyl-adenosine
  modified_base 18: mod_base = OTHER; note = 2'O-methyl-adenosine
  modified_base 19: mod_base = OTHER; note = 2' Fluoro-guanosine
  modified_base 20: mod_base = gm
  modified_base 21: mod_base = OTHER; note = 2'O-methyl-adenosine
  misc_feature 1^2: note = phosphorothioate linkage
  misc_feature 2^3: note = phosphorothioate linkage
ttttgccttcatccacaagga

SEQ ID NO: 694 - RNA, 21 nt, synthetic construct
  source 1..21: mol_type = other RNA
  misc_feature 1..21: note = Description: ZPI siRNA sense strand: ETXS895; corresponding to SEQ ID NO: 254
  modified_base 1: mod_base = cm
  modified_base 2: mod_base = gm
  modified_base 3: mod_base = OTHER; note = 2'O-methyl-adenosine
  modified_base 4: mod_base = OTHER; note = 2'O-methyl-adenosine
  modified_base 5: mod_base = OTHER; note = 2'O-methyl-adenosine
  modified_base 6: mod_base = gm
  modified_base 7: mod_base = OTHER; note = Af
  modified_base 8: mod_base = OTHER; note = 2' Fluoro-uridine
  modified_base 9: mod_base = OTHER; note = 2' Fluoro-cytidine
  modified_base 10: mod_base = OTHER; note = 2' Fluoro-uridine
  modified_base 11: mod_base = OTHER; note = 2' Fluoro-cytidine
  modified_base 12: mod_base = cm
  modified_base 13: mod_base = OTHER; note = 2'O-methyl-adenosine
  modified_base 14: mod_base = um
  modified_base 15: mod_base = gm
  modified_base 16: mod_base = OTHER; note = 2'O-methyl-adenosine
  modified_base 17: mod_base = gm
  modified_base 18: mod_base = gm
  modified_base 19: mod_base = OTHER; note = 2' Fluoro-cytidine
  modified_base 20: mod_base = OTHER; note = 2'O-methyl-adenosine
  modified_base 21: mod_base = cm
  misc_feature 1^2: note = phosphorothioate linkage
  misc_feature 2^3: note = phosphorothioate linkage
cgaaagatctccatgaggcac

SEQ ID NO: 695 - RNA, 21 nt, synthetic construct
  source 1..21: mol_type = other RNA
  misc_feature 1..21: note = Description: ZPI siRNA sense strand: ETXS897; corresponding to SEQ ID NO: 255
  modified_base 1: mod_base = um
  modified_base 2: mod_base = gm
  modified_base 3: mod_base = cm
  modified_base 4: mod_base = um
  modified_base 5: mod_base = gm
  modified_base 6: mod_base = gm
  modified_base 7: mod_base = OTHER; note = 2' Fluoro-uridine
  modified_base 8: mod_base = OTHER; note = 2' Fluoro-guanosine
  modified_base 9: mod_base = OTHER; note = 2' Fluoro-guanosine
  modified_base 10: mod_base = OTHER; note = 2' Fluoro-uridine
  modified_base 11: mod_base = OTHER; note = 2' Fluoro-cytidine
  modified_base 12: mod_base = cm
  modified_base 13: mod_base = um
  modified_base 14: mod_base = cm
  modified_base 15: mod_base = OTHER; note = 2'O-methyl-adenosine
  modified_base 16: mod_base = um
  modified_base 17: mod_base = gm
  modified_base 18: mod_base = gm
  modified_base 19: mod_base = OTHER; note = Af
  modified_base 20: mod_base = gm
  modified_base 21: mod_base = OTHER; note = 2'O-methyl-adenosine
  misc_feature 1^2: note = phosphorothioate linkage
  misc_feature 2^3: note = phosphorothioate linkage
tgctggtggtcctcatggaga

SEQ ID NO: 696 - RNA, 21 nt, synthetic construct
  source 1..21: mol_type = other RNA
  misc_feature 1..21: note = Description: ZPI siRNA sense strand: ETXS899; corresponding to SEQ ID NO: 256
  modified_base 1: mod_base = cm
  modified_base 2: mod_base = cm
  modified_base 3: mod_base = um
  modified_base 4: mod_base = um
  modified_base 5: mod_base = cm
  modified_base 6: mod_base = OTHER; note = 2'O-methyl-adenosine
  modified_base 7: mod_base = OTHER; note = 2' Fluoro-uridine
  modified_base 8: mod_base = OTHER; note = 2' Fluoro-cytidine
  modified_base 9: mod_base = OTHER; note = 2' Fluoro-cytidine
  modified_base 10: mod_base = OTHER; note = Af
  modified_base 11: mod_base = OTHER; note = 2' Fluoro-cytidine
  modified_base 12: mod_base = OTHER; note = 2'O-methyl-adenosine
  modified_base 13: mod_base = OTHER; note = 2'O-methyl-adenosine
  modified_base 14: mod_base = gm
  modified_base 15: mod_base = gm
  modified_base 16: mod_base = OTHER; note = 2'O-methyl-adenosine
  modified_base 17: mod_base = um
  modified_base 18: mod_base = um
  modified_base 19: mod_base = OTHER; note = 2' Fluoro-uridine
  modified_base 20: mod_base = um
  modified_base 21: mod_base = gm
  misc_feature 1^2: note = phosphorothioate linkage
  misc_feature 2^3: note = phosphorothioate linkage
ccttcatccacaaggattttg

SEQ ID NO: 697 - RNA, 21 nt, synthetic construct
  source 1..21: mol_type = other RNA
  misc_feature 1..21: note = Description: ZPI siRNA sense strand: ETXS901; corresponding to SEQ ID NO: 257
  modified_base 1: mod_base = gm
  modified_base 2: mod_base = OTHER; note = 2'O-methyl-adenosine
  modified_base 3: mod_base = OTHER; note = 2'O-methyl-adenosine
  modified_base 4: mod_base = OTHER; note = 2'O-methyl-adenosine
  modified_base 5: mod_base = gm
  modified_base 6: mod_base = OTHER; note = 2'O-methyl-adenosine
  modified_base 7: mod_base = OTHER; note = 2' Fluoro-uridine
  modified_base 8: mod_base = OTHER; note = 2' Fluoro-cytidine
  modified_base 9: mod_base = OTHER; note = 2' Fluoro-uridine
  modified_base 10: mod_base = OTHER; note = 2' Fluoro-cytidine
  modified_base 11: mod_base = OTHER; note = 2' Fluoro-cytidine
  modified_base 12: mod_base = OTHER; note = 2'O-methyl-adenosine
  modified_base 13: mod_base = um
  modified_base 14: mod_base = gm
  modified_base 15: mod_base = OTHER; note = 2'O-methyl-adenosine
  modified_base 16: mod_base = gm
  modified_base 17: mod_base = gm
  modified_base 18: mod_base = cm
  modified_base 19: mod_base = OTHER; note = Af
  modified_base 20: mod_base = cm
  modified_base 21: mod_base = gm
  misc_feature 1^2: note = phosphorothioate linkage
  misc_feature 2^3: note = phosphorothioate linkage
gaaagatctccatgaggcacg

SEQ ID NO: 698 - RNA, 21 nt, synthetic construct
  source 1..21: mol_type = other RNA
  misc_feature 1..21: note = Description: ZPI siRNA sense strand: ETXS903; corresponding to SEQ ID NO: 258
  modified_base 1: mod_base = um
  modified_base 2: mod_base = um
  modified_base 3: mod_base = cm
  modified_base 4: mod_base = OTHER; note = 2'O-methyl-adenosine
  modified_base 5: mod_base = um
  modified_base 6: mod_base = cm
  modified_base 7: mod_base = OTHER; note = 2' Fluoro-cytidine
  modified_base 8: mod_base = OTHER; note = Af
  modified_base 9: mod_base = OTHER; note = 2' Fluoro-cytidine
  modified_base 10: mod_base = OTHER; note = Af
  modified_base 11: mod_base = OTHER; note = Af
  modified_base 12: mod_base = gm
  modified_base 13: mod_base = gm
  modified_base 14: mod_base = OTHER; note = 2'O-methyl-adenosine
  modified_base 15: mod_base = um
  modified_base 16: mod_base = um
  modified_base 17: mod_base = um
  modified_base 18: mod_base = um
  modified_base 19: mod_base = OTHER; note = 2' Fluoro-guanosine
  modified_base 20: mod_base = OTHER; note = 2'O-methyl-adenosine
  modified_base 21: mod_base = um
  misc_feature 1^2: note = phosphorothioate linkage
  misc_feature 2^3: note = phosphorothioate linkage
ttcatccacaaggattttgat

SEQ ID NO: 699 - RNA, 21 nt, synthetic construct
  source 1..21: mol_type = other RNA
  misc_feature 1..21: note = Description: ZPI siRNA sense strand: ETXS905; corresponding to SEQ ID NO: 259
  modified_base 1: mod_base = um
  modified_base 2: mod_base = um
  modified_base 3: mod_base = um
  modified_base 4: mod_base = gm
  modified_base 5: mod_base = OTHER; note = 2'O-methyl-adenosine
  modified_base 6: mod_base = um
  modified_base 7: mod_base = OTHER; note = 2' Fluoro-guanosine
  modified_base 8: mod_base = OTHER; note = Af
  modified_base 9: mod_base = OTHER; note = 2' Fluoro-guanosine
  modified_base 10: mod_base = OTHER; note = Af
  modified_base 11: mod_base = OTHER; note = 2' Fluoro-uridine
  modified_base 12: mod_base = um
  modified_base 13: mod_base = OTHER; note = 2'O-methyl-adenosine
  modified_base 14: mod_base = OTHER; note = 2'O-methyl-adenosine
  modified_base 15: mod_base = um
  modified_base 16: mod_base = cm
  modified_base 17: mod_base = cm
  modified_base 18: mod_base = um
  modified_base 19: mod_base = OTHER; note = 2' Fluoro-guanosine
  modified_base 20: mod_base = OTHER; note = 2'O-methyl-adenosine
  modified_base 21: mod_base = OTHER; note = 2'O-methyl-adenosine
  misc_feature 1^2: note = phosphorothioate linkage
  misc_feature 2^3: note = phosphorothioate linkage
tttgatgagattaatcctgaa

SEQ ID NO: 700 - RNA, 21 nt, synthetic construct
  source 1..21: mol_type = other RNA
  misc_feature 1..21: note = Description: ZPI siRNA sense strand: ETXS907; corresponding to SEQ ID NO: 260
  modified_base 1: mod_base = um
  modified_base 2: mod_base = um
  modified_base 3: mod_base = gm
  modified_base 4: mod_base = cm
  modified_base 5: mod_base = cm
  modified_base 6: mod_base = um
  modified_base 7: mod_base = OTHER; note = 2' Fluoro-uridine
  modified_base 8: mod_base = OTHER; note = 2' Fluoro-cytidine
  modified_base 9: mod_base = OTHER; note = Af
  modified_base 10: mod_base = OTHER; note = 2' Fluoro-uridine
  modified_base 11: mod_base = OTHER; note = 2' Fluoro-cytidine
  modified_base 12: mod_base = cm
  modified_base 13: mod_base = OTHER; note = 2'O-methyl-adenosine
  modified_base 14: mod_base = cm
  modified_base 15: mod_base = OTHER; note = 2'O-methyl-adenosine
  modified_base 16: mod_base = OTHER; note = 2'O-methyl-adenosine
  modified_base 17: mod_base = gm
  modified_base 18: mod_base = gm
  modified_base 19: mod_base = OTHER; note = Af
  modified_base 20: mod_base = um
  modified_base 21: mod_base = um
  misc_feature 1^2: note = phosphorothioate linkage
  misc_feature 2^3: note = phosphorothioate linkage
ttgccttcatccacaaggatt

SEQ ID NO: 701 - RNA, 21 nt, synthetic construct
  source 1..21: mol_type = other RNA
  misc_feature 1..21: note = Description: ZPI siRNA sense strand: ETXS909; corresponding to SEQ ID NO: 261
  modified_base 1: mod_base = gm
  modified_base 2: mod_base = OTHER; note = 2'O-methyl-adenosine
  modified_base 3: mod_base = um
  modified_base 4: mod_base = cm
  modified_base 5: mod_base = um
  modified_base 6: mod_base = cm
  modified_base 7: mod_base = OTHER; note = 2' Fluoro-cytidine
  modified_base 8: mod_base = OTHER; note = Af
  modified_base 9: mod_base = OTHER; note = 2' Fluoro-uridine
  modified_base 10: mod_base = OTHER; note = 2' Fluoro-guanosine
  modified_base 11: mod_base = OTHER; note = Af
  modified_base 12: mod_base = gm
  modified_base 13: mod_base = gm
  modified_base 14: mod_base = cm
  modified_base 15: mod_base = OTHER; note = 2'O-methyl-adenosine
  modified_base 16: mod_base = cm
  modified_base 17: mod_base = gm
  modified_base 18: mod_base = OTHER; note = 2'O-methyl-adenosine
  modified_base 19: mod_base = OTHER; note = 2' Fluoro-uridine
  modified_base 20: mod_base = gm
  modified_base 21: mod_base = gm
  misc_feature 1^2: note = phosphorothioate linkage
  misc_feature 2^3: note = phosphorothioate linkage
gatctccatgaggcacgatgg

SEQ ID NO: 702 - RNA, 21 nt, synthetic construct
  source 1..21: mol_type = other RNA
  misc_feature 1..21: note = Description: ZPI siRNA sense strand: ETXS911; corresponding to SEQ ID NO: 242
  modified_base 1: mod_base = um
  modified_base 2: mod_base = gm
  modified_base 3: mod_base = cm
  modified_base 4: mod_base = cm
  modified_base 5: mod_base = um
  modified_base 6: mod_base = OTHER; note = 2' Fluoro-uridine
  modified_base 7: mod_base = OTHER; note = 2' Fluoro-cytidine
  modified_base 8: mod_base = OTHER; note = 2'O-methyl-adenosine
  modified_base 9: mod_base = OTHER; note = 2' Fluoro-uridine
  modified_base 10: mod_base = OTHER; note = 2' Fluoro-cytidine
  modified_base 11: mod_base = OTHER; note = 2' Fluoro-cytidine
  modified_base 12: mod_base = OTHER; note = Af
  modified_base 13: mod_base = cm
  modified_base 14: mod_base = OTHER; note = 2'O-methyl-adenosine
  modified_base 15: mod_base = OTHER; note = 2'O-methyl-adenosine
  modified_base 16: mod_base = gm
  modified_base 17: mod_base = gm
  modified_base 18: mod_base = OTHER; note = 2'O-methyl-adenosine
  modified_base 19: mod_base = um
  modified_base 20: mod_base = um
  modified_base 21: mod_base = um
  misc_feature 1^2: note = phosphorothioate linkage
  misc_feature 2^3: note = phosphorothioate linkage
tgccttcatccacaaggattt

SEQ ID NO: 703 - RNA, 21 nt, synthetic construct
  source 1..21: mol_type = other RNA
  misc_feature 1..21: note = Description: ZPI siRNA sense strand: ETXS913; corresponding to SEQ ID NO: 243
  modified_base 1: mod_base = um
  modified_base 2: mod_base = gm
  modified_base 3: mod_base = cm
  modified_base 4: mod_base = gm
  modified_base 5: mod_base = OTHER; note = 2'O-methyl-adenosine
  modified_base 6: mod_base = OTHER; note = Af
  modified_base 7: mod_base = OTHER; note = Af
  modified_base 8: mod_base = gm
  modified_base 9: mod_base = OTHER; note = Af
  modified_base 10: mod_base = OTHER; note = 2' Fluoro-uridine
  modified_base 11: mod_base = OTHER; note = 2' Fluoro-cytidine
  modified_base 12: mod_base = OTHER; note = 2' Fluoro-uridine
  modified_base 13: mod_base = cm
  modified_base 14: mod_base = cm
  modified_base 15: mod_base = OTHER; note = 2'O-methyl-adenosine
  modified_base 16: mod_base = um
  modified_base 17: mod_base = gm
  modified_base 18: mod_base = OTHER; note = 2'O-methyl-adenosine
  modified_base 19: mod_base = gm
  modified_base 20: mod_base = gm
  modified_base 21: mod_base = cm
  misc_feature 1^2: note = phosphorothioate linkage
  misc_feature 2^3: note = phosphorothioate linkage
tgcgaaagatctccatgaggc

SEQ ID NO: 704 - RNA, 21 nt, synthetic construct
  source 1..21: mol_type = other RNA
  misc_feature 1..21: note = Description: ZPI siRNA sense strand: ETXS915; corresponding to SEQ ID NO: 244
  modified_base 1: mod_base = gm
  modified_base 2: mod_base = cm
  modified_base 3: mod_base = um
  modified_base 4: mod_base = gm
  modified_base 5: mod_base = gm
  modified_base 6: mod_base = OTHER; note = 2' Fluoro-uridine
  modified_base 7: mod_base = OTHER; note = 2' Fluoro-guanosine
  modified_base 8: mod_base = gm
  modified_base 9: mod_base = OTHER; note = 2' Fluoro-uridine
  modified_base 10: mod_base = OTHER; note = 2' Fluoro-cytidine
  modified_base 11: mod_base = OTHER; note = 2' Fluoro-cytidine
  modified_base 12: mod_base = OTHER; note = 2' Fluoro-uridine
  modified_base 13: mod_base = cm
  modified_base 14: mod_base = OTHER; note = 2'O-methyl-adenosine
  modified_base 15: mod_base = um
  modified_base 16: mod_base = gm
  modified_base 17: mod_base = gm
  modified_base 18: mod_base = OTHER; note = 2'O-methyl-adenosine
  modified_base 19: mod_base = gm
  modified_base 20: mod_base = OTHER; note = 2'O-methyl-adenosine
  modified_base 21: mod_base = OTHER; note = 2'O-methyl-adenosine
  misc_feature 1^2: note = phosphorothioate linkage
  misc_feature 2^3: note = phosphorothioate linkage
gctggtggtcctcatggagaa

SEQ ID NO: 705 - RNA, 21 nt, synthetic construct
  source 1..21: mol_type = other RNA
  misc_feature 1..21: note = Description: ZPI siRNA sense strand: ETXS917; corresponding to SEQ ID NO: 245
  modified_base 1: mod_base = gm
  modified_base 2: mod_base = cm
  modified_base 3: mod_base = gm
  modified_base 4: mod_base = OTHER; note = 2'O-methyl-adenosine
  modified_base 5: mod_base = OTHER; note = 2'O-methyl-adenosine
  modified_base 6: mod_base = OTHER; note = Af
  modified_base 7: mod_base = OTHER; note = 2' Fluoro-guanosine
  modified_base 8: mod_base = OTHER; note = 2'O-methyl-adenosine
  modified_base 9: mod_base = OTHER; note = 2' Fluoro-uridine
  modified_base 10: mod_base = OTHER; note = 2' Fluoro-cytidine
  modified_base 11: mod_base = OTHER; note = 2' Fluoro-uridine
  modified_base 12: mod_base = OTHER; note = 2' Fluoro-cytidine
  modified_base 13: mod_base = cm
  modified_base 14: mod_base = OTHER; note = 2'O-methyl-adenosine
  modified_base 15: mod_base = um
  modified_base 16: mod_base = gm
  modified_base 17: mod_base = OTHER; note = 2'O-methyl-adenosine
  modified_base 18: mod_base = gm
  modified_base 19: mod_base = gm
  modified_base 20: mod_base = cm
  modified_base 21: mod_base = OTHER; note = 2'O-methyl-adenosine
  misc_feature 1^2: note = phosphorothioate linkage
  misc_feature 2^3: note = phosphorothioate linkage
gcgaaagatctccatgaggca

SEQ ID NO: 706 - RNA, 21 nt, synthetic construct
  source 1..21: mol_type = other RNA
  misc_feature 1..21: note = Description: ZPI siRNA sense strand: ETXS919; corresponding to SEQ ID NO: 246
  modified_base 1: mod_base = gm
  modified_base 2: mod_base = um
  modified_base 3: mod_base = OTHER; note = 2'O-methyl-adenosine
  modified_base 4: mod_base = um
  modified_base 5: mod_base = gm
  modified_base 6: mod_base = OTHER; note = Af
  modified_base 7: mod_base = OTHER; note = 2' Fluoro-guanosine
  modified_base 8: mod_base = OTHER; note = 2'O-methyl-adenosine
  modified_base 9: mod_base = OTHER; note = 2' Fluoro-uridine
  modified_base 10: mod_base = OTHER; note = 2' Fluoro-guanosine
  modified_base 11: mod_base = OTHER; note = 2' Fluoro-cytidine
  modified_base 12: mod_base = OTHER; note = Af
  modified_base 13: mod_base = um
  modified_base 14: mod_base = gm
  modified_base 15: mod_base = OTHER; note = 2'O-methyl-adenosine
  modified_base 16: mod_base = gm
  modified_base 17: mod_base = cm
  modified_base 18: mod_base = um
  modified_base 19: mod_base = gm
  modified_base 20: mod_base = cm
  modified_base 21: mod_base = um
  misc_feature 1^2: note = phosphorothioate linkage
  misc_feature 2^3: note = phosphorothioate linkage
gtatgagatgcatgagctgct

SEQ ID NO: 707 - RNA, 21 nt, synthetic construct
  source 1..21: mol_type = other RNA
  misc_feature 1..21: note = Description: ZPI siRNA sense strand: ETXS921; corresponding to SEQ ID NO: 247
  modified_base 1: mod_base = gm
  modified_base 2: mod_base = um
  modified_base 3: mod_base = um
  modified_base 4: mod_base = um
  modified_base 5: mod_base = gm
  modified_base 6: mod_base = OTHER; note = Af
  modified_base 7: mod_base = OTHER; note = 2' Fluoro-uridine
  modified_base 8: mod_base = gm
  modified_base 9: mod_base = OTHER; note = Af
  modified_base 10: mod_base = OTHER; note = 2' Fluoro-guanosine
  modified_base 11: mod_base = OTHER; note = Af
  modified_base 12: mod_base = OTHER; note = 2' Fluoro-uridine
  modified_base 13: mod_base = um
  modified_base 14: mod_base = OTHER; note = 2'O-methyl-adenosine
  modified_base 15: mod_base = OTHER; note = 2'O-methyl-adenosine
  modified_base 16: mod_base = um
  modified_base 17: mod_base = cm
  modified_base 18: mod_base = cm
  modified_base 19: mod_base = um
  modified_base 20: mod_base = gm
  modified_base 21: mod_base = OTHER; note = 2'O-methyl-adenosine
  misc_feature 1^2: note = phosphorothioate linkage
  misc_feature 2^3: note = phosphorothioate linkage
gtttgatgagattaatcctga

SEQ ID NO: 708 - RNA, 21 nt, synthetic construct
  source 1..21: mol_type = other RNA
  misc_feature 1..21: note = Description: ZPI siRNA sense strand: ETXS923; corresponding to SEQ ID NO: 248
  modified_base 1: mod_base = um
  modified_base 2: mod_base = gm
  modified_base 3: mod_base = OTHER; note = 2'O-methyl-adenosine
  modified_base 4: mod_base = gm
  modified_base 5: mod_base = OTHER; note = 2'O-methyl-adenosine
  modified_base 6: mod_base = OTHER; note = 2' Fluoro-uridine
  modified_base 7: mod_base = OTHER; note = 2' Fluoro-uridine
  modified_base 8: mod_base = OTHER; note = 2'O-methyl-adenosine
  modified_base 9: mod_base = OTHER; note = Af
  modified_base 10: mod_base = OTHER; note = 2' Fluoro-uridine
  modified_base 11: mod_base = OTHER; note = 2' Fluoro-cytidine
  modified_base 12: mod_base = OTHER; note = 2' Fluoro-cytidine
  modified_base 13: mod_base = um
  modified_base 14: mod_base = gm
  modified_base 15: mod_base = OTHER; note = 2'O-methyl-adenosine
  modified_base 16: mod_base = OTHER; note = 2'O-methyl-adenosine
  modified_base 17: mod_base = OTHER; note = 2'O-methyl-adenosine
  modified_base 18: mod_base = cm
  modified_base 19: mod_base = cm
  modified_base 20: mod_base = OTHER; note = 2'O-methyl-adenosine
  modified_base 21: mod_base = OTHER; note = 2'O-methyl-adenosine
  misc_feature 1^2: note = phosphorothioate linkage
  misc_feature 2^3: note = phosphorothioate linkage
tgagattaatcctgaaaccaa

SEQ ID NO: 709 - RNA, 21 nt, synthetic construct
  source 1..21: mol_type = other RNA
  misc_feature 1..21: note = Description: ZPI siRNA sense strand: ETXS925; corresponding to SEQ ID NO: 249
  modified_base 1: mod_base = um
  modified_base 2: mod_base = gm
  modified_base 3: mod_base = OTHER; note = 2'O-methyl-adenosine
  modified_base 4: mod_base = um
  modified_base 5: mod_base = gm
  modified_base 6: mod_base = OTHER; note = Af
  modified_base 7: mod_base = OTHER; note = 2' Fluoro-guanosine
  modified_base 8: mod_base = OTHER; note = 2'O-methyl-adenosine
  modified_base 9: mod_base = OTHER; note = 2' Fluoro-uridine
  modified_base 10: mod_base = OTHER; note = 2' Fluoro-uridine
  modified_base 11: mod_base = OTHER; note = Af
  modified_base 12: mod_base = OTHER; note = Af
  modified_base 13: mod_base = um
  modified_base 14: mod_base = cm
  modified_base 15: mod_base = cm
  modified_base 16: mod_base = um
  modified_base 17: mod_base = gm
  modified_base 18: mod_base = OTHER; note = 2'O-methyl-adenosine
  modified_base 19: mod_base = OTHER; note = 2'O-methyl-adenosine
  modified_base 20: mod_base = OTHER; note = 2'O-methyl-adenosine
  modified_base 21: mod_base = cm
  misc_feature 1^2: note = phosphorothioate linkage
  misc_feature 2^3: note = phosphorothioate linkage
tgatgagattaatcctgaaac

SEQ ID NO: 710 - RNA, 21 nt, synthetic construct
  source 1..21: mol_type = other RNA
  misc_feature 1..21: note = Description: ZPI siRNA sense strand: ETXS927; corresponding to SEQ ID NO: 250
  modified_base 1: mod_base = OTHER; note = 2'O-methyl-adenosine
  modified_base 2: mod_base = um
  modified_base 3: mod_base = gm
  modified_base 4: mod_base = OTHER; note = 2'O-methyl-adenosine
  modified_base 5: mod_base = gm
  modified_base 6: mod_base = OTHER; note = Af
  modified_base 7: mod_base = OTHER; note = 2' Fluoro-uridine
  modified_base 8: mod_base = um
  modified_base 9: mod_base = OTHER; note = Af
  modified_base 10: mod_base = OTHER; note = Af
  modified_base 11: mod_base = OTHER; note = 2' Fluoro-uridine
  modified_base 12: mod_base = OTHER; note = 2' Fluoro-cytidine
  modified_base 13: mod_base = cm
  modified_base 14: mod_base = um
  modified_base 15: mod_base = gm
  modified_base 16: mod_base = OTHER; note = 2'O-methyl-adenosine
  modified_base 17: mod_base = OTHER; note = 2'O-methyl-adenosine
  modified_base 18: mod_base = OTHER; note = 2'O-methyl-adenosine
  modified_base 19: mod_base = cm
  modified_base 20: mod_base = cm
  modified_base 21: mod_base = OTHER; note = 2'O-methyl-adenosine
  misc_feature 1^2: note = phosphorothioate linkage
  misc_feature 2^3: note = phosphorothioate linkage
atgagattaatcctgaaacca

SEQ ID NO: 711 - RNA, 21 nt, synthetic construct
  source 1..21: mol_type = other RNA
  misc_feature 1..21: note = Description: ZPI siRNA sense strand: ETXS929; corresponding to SEQ ID NO: 251
  modified_base 1: mod_base = gm
  modified_base 2: mod_base = OTHER; note = 2'O-methyl-adenosine
  modified_base 3: mod_base = um
  modified_base 4: mod_base = gm
  modified_base 5: mod_base = OTHER; note = 2'O-methyl-adenosine
  modified_base 6: mod_base = OTHER; note = 2' Fluoro-guanosine
  modified_base 7: mod_base = OTHER; note = Af
  modified_base 8: mod_base = um
  modified_base 9: mod_base = OTHER; note = 2' Fluoro-uridine
  modified_base 10: mod_base = OTHER; note = Af
  modified_base 11: mod_base = OTHER; note = Af
  modified_base 12: mod_base = OTHER; note = 2' Fluoro-uridine
  modified_base 13: mod_base = cm
  modified_base 14: mod_base = cm
  modified_base 15: mod_base = um
  modified_base 16: mod_base = gm
  modified_base 17: mod_base = OTHER; note = 2'O-methyl-adenosine
  modified_base 18: mod_base = OTHER; note = 2'O-methyl-adenosine
  modified_base 19: mod_base = OTHER; note = 2'O-methyl-adenosine
  modified_base 20: mod_base = cm
  modified_base 21: mod_base = cm
  misc_feature 1^2: note = phosphorothioate linkage
  misc_feature 2^3: note = phosphorothioate linkage
gatgagattaatcctgaaacc

SEQ ID NO: 712 - RNA, 21 nt, synthetic construct
  source 1..21: mol_type = other RNA
  misc_feature 1..21: note = Description: ZPI siRNA sense strand: ETXS931; corresponding to SEQ ID NO: 252
  modified_base 1: mod_base = cm
  modified_base 2: mod_base = um
  modified_base 3: mod_base = gm
  modified_base 4: mod_base = um
  modified_base 5: mod_base = um
  modified_base 6: mod_base = OTHER; note = 2' Fluoro-uridine
  modified_base 7: mod_base = OTHER; note = 2' Fluoro-guanosine
  modified_base 8: mod_base = OTHER; note = 2'O-methyl-adenosine
  modified_base 9: mod_base = OTHER; note = 2' Fluoro-uridine
  modified_base 10: mod_base = OTHER; note = 2' Fluoro-guanosine
  modified_base 11: mod_base = OTHER; note = Af
  modified_base 12: mod_base = OTHER; note = 2' Fluoro-guanosine
  modified_base 13: mod_base = OTHER; note = 2'O-methyl-adenosine
  modified_base 14: mod_base = um
  modified_base 15: mod_base = um
  modified_base 16: mod_base = OTHER; note = 2'O-methyl-adenosine
  modified_base 17: mod_base = OTHER; note = 2'O-methyl-adenosine
  modified_base 18: mod_base = um
  modified_base 19: mod_base = cm
  modified_base 20: mod_base = cm
  modified_base 21: mod_base = um
  misc_feature 1^2: note = phosphorothioate linkage
  misc_feature 2^3: note = phosphorothioate linkage
ctgtttgatgagattaatcct

SEQ ID NO: 713 - RNA, 21 nt, synthetic construct
  source 1..21: mol_type = other RNA
  misc_feature 1..21: note = Description: ZPI siRNA sense strand: ETXS933; corresponding to SEQ ID NO: 253
  modified_base 1: mod_base = um
  modified_base 2: mod_base = um
  modified_base 3: mod_base = um
  modified_base 4: mod_base = um
  modified_base 5: mod_base = gm
  modified_base 6: mod_base = OTHER; note = 2' Fluoro-cytidine
  modified_base 7: mod_base = OTHER; note = 2' Fluoro-cytidine
  modified_base 8: mod_base = um
  modified_base 9: mod_base = OTHER; note = 2' Fluoro-uridine
  modified_base 10: mod_base = OTHER; note = 2' Fluoro-cytidine
  modified_base 11: mod_base = OTHER; note = Af
  modified_base 12: mod_base = OTHER; note = 2' Fluoro-uridine
  modified_base 13: mod_base = cm
  modified_base 14: mod_base = cm
  modified_base 15: mod_base = OTHER; note = 2'O-methyl-adenosine
  modified_base 16: mod_base = cm
  modified_base 17: mod_base = OTHER; note = 2'O-methyl-adenosine
  modified_base 18: mod_base = OTHER; note = 2'O-methyl-adenosine
  modified_base 19: mod_base = gm
  modified_base 20: mod_base = gm
  modified_base 21: mod_base = OTHER; note = 2'O-methyl-adenosine
  misc_feature 1^2: note = phosphorothioate linkage
  misc_feature 2^3: note = phosphorothioate linkage
ttttgccttcatccacaagga

SEQ ID NO: 714 - RNA, 21 nt, synthetic construct
  source 1..21: mol_type = other RNA
  misc_feature 1..21: note = Description: ZPI siRNA sense strand: ETXS935; corresponding to SEQ ID NO: 254
  modified_base 1: mod_base = cm
  modified_base 2: mod_base = gm
  modified_base 3: mod_base = OTHER; note = 2'O-methyl-adenosine
  modified_base 4: mod_base = OTHER; note = 2'O-methyl-adenosine
  modified_base 5: mod_base = OTHER; note = 2'O-methyl-adenosine
  modified_base 6: mod_base = OTHER; note = 2' Fluoro-guanosine
  modified_base 7: mod_base = OTHER; note = Af
  modified_base 8: mod_base = um
  modified_base 9: mod_base = OTHER; note = 2' Fluoro-cytidine
  modified_base 10: mod_base = OTHER; note = 2' Fluoro-uridine
  modified_base 11: mod_base = OTHER; note = 2' Fluoro-cytidine
  modified_base 12: mod_base = OTHER; note = 2' Fluoro-cytidine
  modified_base 13: mod_base = OTHER; note = 2'O-methyl-adenosine
  modified_base 14: mod_base = um
  modified_base 15: mod_base = gm
  modified_base 16: mod_base = OTHER; note = 2'O-methyl-adenosine
  modified_base 17: mod_base = gm
  modified_base 18: mod_base = gm
  modified_base 19: mod_base = cm
  modified_base 20: mod_base = OTHER; note = 2'O-methyl-adenosine
  modified_base 21: mod_base = cm
  misc_feature 1^2: note = phosphorothioate linkage
  misc_feature 2^3: note = phosphorothioate linkage
cgaaagatctccatgaggcac

SEQ ID NO: 715 - RNA, 21 nt, synthetic construct
  source 1..21: mol_type = other RNA
  misc_feature 1..21: note = Description: ZPI siRNA sense strand: ETXS937; corresponding to SEQ ID NO: 255
  modified_base 1: mod_base = um
  modified_base 2: mod_base = gm
  modified_base 3: mod_base = cm
  modified_base 4: mod_base = um
  modified_base 5: mod_base = gm
  modified_base 6: mod_base = OTHER; note = 2' Fluoro-guanosine
  modified_base 7: mod_base = OTHER; note = 2' Fluoro-uridine
  modified_base 8: mod_base = gm
  modified_base 9: mod_base = OTHER; note = 2' Fluoro-guanosine
  modified_base 10: mod_base = OTHER; note = 2' Fluoro-uridine
  modified_base 11: mod_base = OTHER; note = 2' Fluoro-cytidine
  modified_base 12: mod_base = OTHER; note = 2' Fluoro-cytidine
  modified_base 13: mod_base = um
  modified_base 14: mod_base = cm
  modified_base 15: mod_base = OTHER; note = 2'O-methyl-adenosine
  modified_base 16: mod_base = um
  modified_base 17: mod_base = gm
  modified_base 18: mod_base = gm
  modified_base 19: mod_base = OTHER; note = 2'O-methyl-adenosine
  modified_base 20: mod_base = gm
  modified_base 21: mod_base = OTHER; note = 2'O-methyl-adenosine
  misc_feature 1^2: note = phosphorothioate linkage
  misc_feature 2^3: note = phosphorothioate linkage
tgctggtggtcctcatggaga

SEQ ID NO: 716 - RNA, 21 nt, synthetic construct
  source 1..21: mol_type = other RNA
  misc_feature 1..21: note = Description: ZPI siRNA sense strand: ETXS939; corresponding to SEQ ID NO: 256
  modified_base 1: mod_base = cm
  modified_base 2: mod_base = cm
  modified_base 3: mod_base = um
  modified_base 4: mod_base = um
  modified_base 5: mod_base = cm
  modified_base 6: mod_base = OTHER; note = Af
  modified_base 7: mod_base = OTHER; note = 2' Fluoro-uridine
  modified_base 8: mod_base = cm
  modified_base 9: mod_base = OTHER; note = 2' Fluoro-cytidine
  modified_base 10: mod_base = OTHER; note = Af
  modified_base 11: mod_base = OTHER; note = 2' Fluoro-cytidine
  modified_base 12: mod_base = OTHER; note = Af
  modified_base 13: mod_base = OTHER; note = 2'O-methyl-adenosine
  modified_base 14: mod_base = gm
  modified_base 15: mod_base = gm
  modified_base 16: mod_base = OTHER; note = 2'O-methyl-adenosine
  modified_base 17: mod_base = um
  modified_base 18: mod_base = um
  modified_base 19: mod_base = um
  modified_base 20: mod_base = um
  modified_base 21: mod_base = gm
  misc_feature 1^2: note = phosphorothioate linkage
  misc_feature 2^3: note = phosphorothioate linkage
ccttcatccacaaggattttg

SEQ ID NO: 717 - RNA, 21 nt, synthetic construct
  source 1..21: mol_type = other RNA
  misc_feature 1..21: note = Description: ZPI siRNA sense strand: ETXS941; corresponding to SEQ ID NO: 257
  modified_base 1: mod_base = gm
  modified_base 2: mod_base = OTHER; note = 2'O-methyl-adenosine
  modified_base 3: mod_base = OTHER; note = 2'O-methyl-adenosine
  modified_base 4: mod_base = OTHER; note = 2'O-methyl-adenosine
  modified_base 5: mod_base = gm
  modified_base 6: mod_base = OTHER; note = Af
  modified_base 7: mod_base = OTHER; note = 2' Fluoro-uridine
  modified_base 8: mod_base = cm
  modified_base 9: mod_base = OTHER; note = 2' Fluoro-uridine
  modified_base 10: mod_base = OTHER; note = 2' Fluoro-cytidine
  modified_base 11: mod_base = OTHER; note = 2' Fluoro-cytidine
  modified_base 12: mod_base = OTHER; note = Af
  modified_base 13: mod_base = um
  modified_base 14: mod_base = gm
  modified_base 15: mod_base = OTHER; note = 2'O-methyl-adenosine
  modified_base 16: mod_base = gm
  modified_base 17: mod_base = gm
  modified_base 18: mod_base = cm
  modified_base 19: mod_base = OTHER; note = 2'O-methyl-adenosine
  modified_base 20: mod_base = cm
  modified_base 21: mod_base = gm
  misc_feature 1^2: note = phosphorothioate linkage
  misc_feature 2^3: note = phosphorothioate linkage
gaaagatctccatgaggcacg

SEQ ID NO: 718 - RNA, 21 nt, synthetic construct
  source 1..21: mol_type = other RNA
  misc_feature 1..21: note = Description: ZPI siRNA sense strand: ETXS943; corresponding to SEQ ID NO: 258
  modified_base 1: mod_base = um
  modified_base 2: mod_base = um
  modified_base 3: mod_base = cm
  modified_base 4: mod_base = OTHER; note = 2'O-methyl-adenosine
  modified_base 5: mod_base = um
  modified_base 6: mod_base = OTHER; note = 2' Fluoro-cytidine
  modified_base 7: mod_base = OTHER; note = 2' Fluoro-cytidine
  modified_base 8: mod_base = OTHER; note = 2'O-methyl-adenosine
  modified_base 9: mod_base = OTHER; note = 2' Fluoro-cytidine
  modified_base 10: mod_base = OTHER; note = Af
  modified_base 11: mod_base = OTHER; note = Af
  modified_base 12: mod_base = OTHER; note = 2' Fluoro-guanosine
  modified_base 13: mod_base = gm
  modified_base 14: mod_base = OTHER; note = 2'O-methyl-adenosine
  modified_base 15: mod_base = um
  modified_base 16: mod_base = um
  modified_base 17: mod_base = um
  modified_base 18: mod_base = um
  modified_base 19: mod_base = gm
  modified_base 20: mod_base = OTHER; note = 2'O-methyl-adenosine
  modified_base 21: mod_base = um
  misc_feature 1^2: note = phosphorothioate linkage
  misc_feature 2^3: note = phosphorothioate linkage
ttcatccacaaggattttgat

SEQ ID NO: 719 - RNA, 21 nt, synthetic construct
  source 1..21: mol_type = other RNA
  misc_feature 1..21: note = Description: ZPI siRNA sense strand: ETXS945; corresponding to SEQ ID NO: 259
  modified_base 1: mod_base = um
  modified_base 2: mod_base = um
  modified_base 3: mod_base = um
  modified_base 4: mod_base = gm
  modified_base 5: mod_base = OTHER; note = 2'O-methyl-adenosine
  modified_base 6: mod_base = OTHER; note = 2' Fluoro-uridine
  modified_base 7: mod_base = OTHER; note = 2' Fluoro-guanosine
  modified_base 8: mod_base = OTHER; note = 2'O-methyl-adenosine
  modified_base 9: mod_base = OTHER; note = 2' Fluoro-guanosine
  modified_base 10: mod_base = OTHER; note = Af
  modified_base 11: mod_base = OTHER; note = 2' Fluoro-uridine
  modified_base 12: mod_base = OTHER; note = 2' Fluoro-uridine
  modified_base 13: mod_base = OTHER; note = 2'O-methyl-adenosine
  modified_base 14: mod_base = OTHER; note = 2'O-methyl-adenosine
  modified_base 15: mod_base = um
  modified_base 16: mod_base = cm
  modified_base 17: mod_base = cm
  modified_base 18: mod_base = um
  modified_base 19: mod_base = gm
  modified_base 20: mod_base = OTHER; note = 2'O-methyl-adenosine
  modified_base 21: mod_base = OTHER; note = 2'O-methyl-adenosine
  misc_feature 1^2: note = phosphorothioate linkage
  misc_feature 2^3: note = phosphorothioate linkage
tttgatgagattaatcctgaa

SEQ ID NO: 720 - RNA, 21 nt, synthetic construct
  source 1..21: mol_type = other RNA
  misc_feature 1..21: note = Description: ZPI siRNA sense strand: ETXS947; corresponding to SEQ ID NO: 260
  modified_base 1: mod_base = um
  modified_base 2: mod_base = um
  modified_base 3: mod_base = gm
  modified_base 4: mod_base = cm
  modified_base 5: mod_base = cm
  modified_base 6: mod_base = OTHER; note = 2' Fluoro-uridine
  modified_base 7: mod_base = OTHER; note = 2' Fluoro-uridine
  modified_base 8: mod_base = cm
  modified_base 9: mod_base = OTHER; note = Af
  modified_base 10: mod_base = OTHER; note = 2' Fluoro-uridine
  modified_base 11: mod_base = OTHER; note = 2' Fluoro-cytidine
  modified_base 12: mod_base = OTHER; note = 2' Fluoro-cytidine
  modified_base 13: mod_base = OTHER; note = 2'O-methyl-adenosine
  modified_base 14: mod_base = cm
  modified_base 15: mod_base = OTHER; note = 2'O-methyl-adenosine
  modified_base 16: mod_base = OTHER; note = 2'O-methyl-adenosine
  modified_base 17: mod_base = gm
  modified_base 18: mod_base = gm
  modified_base 19: mod_base = OTHER; note = 2'O-methyl-adenosine
  modified_base 20: mod_base = um
  modified_base 21: mod_base = um
  misc_feature 1^2: note = phosphorothioate linkage
  misc_feature 2^3: note = phosphorothioate linkage
ttgccttcatccacaaggatt

SEQ ID NO: 721 - RNA, 21 nt, synthetic construct
  source 1..21: mol_type = other RNA
  misc_feature 1..21: note = Description: ZPI siRNA sense strand: ETXS949; corresponding to SEQ ID NO: 261
  modified_base 1: mod_base = gm
  modified_base 2: mod_base = OTHER; note = 2'O-methyl-adenosine
  modified_base 3: mod_base = um
  modified_base 4: mod_base = cm
  modified_base 5: mod_base = um
  modified_base 6: mod_base = OTHER; note = 2' Fluoro-cytidine
  modified_base 7: mod_base = OTHER; note = 2' Fluoro-cytidine
  modified_base 8: mod_base = OTHER; note = 2'O-methyl-adenosine
  modified_base 9: mod_base = OTHER; note = 2' Fluoro-uridine
  modified_base 10: mod_base = OTHER; note = 2' Fluoro-guanosine
  modified_base 11: mod_base = OTHER; note = Af
  modified_base 12: mod_base = OTHER; note = 2' Fluoro-guanosine
  modified_base 13: mod_base = gm
  modified_base 14: mod_base = cm
  modified_base 15: mod_base = OTHER; note = 2'O-methyl-adenosine
  modified_base 16: mod_base = cm
  modified_base 17: mod_base = gm
  modified_base 18: mod_base = OTHER; note = 2'O-methyl-adenosine
  modified_base 19: mod_base = um
  modified_base 20: mod_base = gm
  modified_base 21: mod_base = gm
  misc_feature 1^2: note = phosphorothioate linkage
  misc_feature 2^3: note = phosphorothioate linkage
gatctccatgaggcacgatgg

SEQ ID NO: 722 - RNA, 21 nt, synthetic construct
  source 1..21: mol_type = other RNA
  misc_feature 1..21: note = Description: ZPI siRNA sense strand: ETXS951; corresponding to SEQ ID NO: 242
  modified_base 1: mod_base = um
  modified_base 2: mod_base = gm
  modified_base 3: mod_base = cm
  modified_base 4: mod_base = cm
  modified_base 5: mod_base = um
  modified_base 6: mod_base = um
  modified_base 7: mod_base = OTHER; note = 2' Fluoro-cytidine
  modified_base 8: mod_base = OTHER; note = 2'O-methyl-adenosine
  modified_base 9: mod_base = OTHER; note = 2' Fluoro-uridine
  modified_base 10: mod_base = OTHER; note = 2' Fluoro-cytidine
  modified_base 11: mod_base = OTHER; note = 2' Fluoro-cytidine
  modified_base 12: mod_base = OTHER; note = Af
  modified_base 13: mod_base = cm
  modified_base 14: mod_base = OTHER; note = 2'O-methyl-adenosine
  modified_base 15: mod_base = OTHER; note = 2'O-methyl-adenosine
  modified_base 16: mod_base = gm
  modified_base 17: mod_base = gm
  modified_base 18: mod_base = OTHER; note = 2'O-methyl-adenosine
  modified_base 19: mod_base = um
  modified_base 20: mod_base = um
  modified_base 21: mod_base = um
  misc_feature 1^2: note = phosphorothioate linkage
  misc_feature 2^3: note = phosphorothioate linkage
tgccttcatccacaaggattt

SEQ ID NO: 723 - RNA, 21 nt, synthetic construct
  source 1..21: mol_type = other RNA
  misc_feature 1..21: note = Description: ZPI siRNA sense strand: ETXS953; corresponding to SEQ ID NO: 243
  modified_base 1: mod_base = um
  modified_base 2: mod_base = gm
  modified_base 3: mod_base = cm
  modified_base 4: mod_base = gm
  modified_base 5: mod_base = OTHER; note = 2'O-methyl-adenosine
  modified_base 6: mod_base = OTHER; note = 2'O-methyl-adenosine
  modified_base 7: mod_base = OTHER; note = Af
  modified_base 8: mod_base = gm
  modified_base 9: mod_base = OTHER; note = Af
  modified_base 10: mod_base = OTHER; note = 2' Fluoro-uridine
  modified_base 11: mod_base = OTHER; note = 2' Fluoro-cytidine
  modified_base 12: mod_base = OTHER; note = 2' Fluoro-uridine
  modified_base 13: mod_base = cm
  modified_base 14: mod_base = cm
  modified_base 15: mod_base = OTHER; note = 2'O-methyl-adenosine
  modified_base 16: mod_base = um
  modified_base 17: mod_base = gm
  modified_base 18: mod_base = OTHER; note = 2'O-methyl-adenosine
  modified_base 19: mod_base = gm
  modified_base 20: mod_base = gm
  modified_base 21: mod_base = cm
  misc_feature 1^2: note = phosphorothioate linkage
  misc_feature 2^3: note = phosphorothioate linkage
tgcgaaagatctccatgaggc

SEQ ID NO: 724 - RNA, 21 nt, synthetic construct
  source 1..21: mol_type = other RNA
  misc_feature 1..21: note = Description: ZPI siRNA sense strand: ETXS955; corresponding to SEQ ID NO: 244
  modified_base 1: mod_base = gm
  modified_base 2: mod_base = cm
  modified_base 3: mod_base = um
  modified_base 4: mod_base = gm
  modified_base 5: mod_base = gm
  modified_base 6: mod_base = um
  modified_base 7: mod_base = OTHER; note = 2' Fluoro-guanosine
  modified_base 8: mod_base = gm
  modified_base 9: mod_base = OTHER; note = 2' Fluoro-uridine
  modified_base 10: mod_base = OTHER; note = 2' Fluoro-cytidine
  modified_base 11: mod_base = OTHER; note = 2' Fluoro-cytidine
  modified_base 12: mod_base = OTHER; note = 2' Fluoro-uridine
  modified_base 13: mod_base = cm
  modified_base 14: mod_base = OTHER; note = 2'O-methyl-adenosine
  modified_base 15: mod_base = um
  modified_base 16: mod_base = gm
  modified_base 17: mod_base = gm
  modified_base 18: mod_base = OTHER; note = 2'O-methyl-adenosine
  modified_base 19: mod_base = gm
  modified_base 20: mod_base = OTHER; note = 2'O-methyl-adenosine
  modified_base 21: mod_base = OTHER; note = 2'O-methyl-adenosine
  misc_feature 1^2: note = phosphorothioate linkage
  misc_feature 2^3: note = phosphorothioate linkage
gctggtggtcctcatggagaa

SEQ ID NO: 725 - RNA, 21 nt, synthetic construct
  source 1..21: mol_type = other RNA
  misc_feature 1..21: note = Description: ZPI siRNA sense strand: ETXS957; corresponding to SEQ ID NO: 245
  modified_base 1: mod_base = gm
  modified_base 2: mod_base = cm
  modified_base 3: mod_base = gm
  modified_base 4: mod_base = OTHER; note = 2'O-methyl-adenosine
  modified_base 5: mod_base = OTHER; note = 2'O-methyl-adenosine
  modified_base 6: mod_base = OTHER; note = 2'O-methyl-adenosine
  modified_base 7: mod_base = OTHER; note = 2' Fluoro-guanosine
  modified_base 8: mod_base = OTHER; note = 2'O-methyl-adenosine
  modified_base 9: mod_base = OTHER; note = 2' Fluoro-uridine
  modified_base 10: mod_base = OTHER; note = 2' Fluoro-cytidine
  modified_base 11: mod_base = OTHER; note = 2' Fluoro-uridine
  modified_base 12: mod_base = OTHER; note = 2' Fluoro-cytidine
  modified_base 13: mod_base = cm
  modified_base 14: mod_base = OTHER; note = 2'O-methyl-adenosine
  modified_base 15: mod_base = um
  modified_base 16: mod_base = gm
  modified_base 17: mod_base = OTHER; note = 2'O-methyl-adenosine
  modified_base 18: mod_base = gm
  modified_base 19: mod_base = gm
  modified_base 20: mod_base = cm
  modified_base 21: mod_base = OTHER; note = 2'O-methyl-adenosine
  misc_feature 1^2: note = phosphorothioate linkage
  misc_feature 2^3: note = phosphorothioate linkage
gcgaaagatctccatgaggca

SEQ ID NO: 726 - RNA, 21 nt, synthetic construct
  source 1..21: mol_type = other RNA
  misc_feature 1..21: note = Description: ZPI siRNA sense strand: ETXS959; corresponding to SEQ ID NO: 246
  modified_base 1: mod_base = gm
  modified_base 2: mod_base = um
  modified_base 3: mod_base = OTHER; note = 2'O-methyl-adenosine
  modified_base 4: mod_base = um
  modified_base 5: mod_base = gm
  modified_base 6: mod_base = OTHER; note = 2'O-methyl-adenosine
  modified_base 7: mod_base = OTHER; note = 2' Fluoro-guanosine
  modified_base 8: mod_base = OTHER; note = 2'O-methyl-adenosine
  modified_base 9: mod_base = OTHER; note = 2' Fluoro-uridine
  modified_base 10: mod_base = OTHER; note = 2' Fluoro-guanosine
  modified_base 11: mod_base = OTHER; note = 2' Fluoro-cytidine
  modified_base 12: mod_base = OTHER; note = Af
  modified_base 13: mod_base = um
  modified_base 14: mod_base = gm
  modified_base 15: mod_base = OTHER; note = 2'O-methyl-adenosine
  modified_base 16: mod_base = gm
  modified_base 17: mod_base = cm
  modified_base 18: mod_base = um
  modified_base 19: mod_base = gm
  modified_base 20: mod_base = cm
  modified_base 21: mod_base = um
  misc_feature 1^2: note = phosphorothioate linkage
  misc_feature 2^3: note = phosphorothioate linkage
gtatgagatgcatgagctgct

SEQ ID NO: 727 - RNA, 21 nt, synthetic construct
  source 1..21: mol_type = other RNA
  misc_feature 1..21: note = Description: ZPI siRNA sense strand: ETXS961; corresponding to SEQ ID NO: 247
  modified_base 1: mod_base = gm
  modified_base 2: mod_base = um
  modified_base 3: mod_base = um
  modified_base 4: mod_base = um
  modified_base 5: mod_base = gm
  modified_base 6: mod_base = OTHER; note = 2'O-methyl-adenosine
  modified_base 7: mod_base = OTHER; note = 2' Fluoro-uridine
  modified_base 8: mod_base = gm
  modified_base 9: mod_base = OTHER; note = Af
  modified_base 10: mod_base = OTHER; note = 2' Fluoro-guanosine
  modified_base 11: mod_base = OTHER; note = Af
  modified_base 12: mod_base = OTHER; note = 2' Fluoro-uridine
  modified_base 13: mod_base = um
  modified_base 14: mod_base = OTHER; note = 2'O-methyl-adenosine
  modified_base 15: mod_base = OTHER; note = 2'O-methyl-adenosine
  modified_base 16: mod_base = um
  modified_base 17: mod_base = cm
  modified_base 18: mod_base = cm
  modified_base 19: mod_base = um
  modified_base 20: mod_base = gm
  modified_base 21: mod_base = OTHER; note = 2'O-methyl-adenosine
  misc_feature 1^2: note = phosphorothioate linkage
  misc_feature 2^3: note = phosphorothioate linkage
gtttgatgagattaatcctga

SEQ ID NO: 728 - RNA, 21 nt, synthetic construct
  source 1..21: mol_type = other RNA
  misc_feature 1..21: note = Description: ZPI siRNA sense strand: ETXS963; corresponding to SEQ ID NO: 248
  modified_base 1: mod_base = um
  modified_base 2: mod_base = gm
  modified_base 3: mod_base = OTHER; note = 2'O-methyl-adenosine
  modified_base 4: mod_base = gm
  modified_base 5: mod_base = OTHER; note = 2'O-methyl-adenosine
  modified_base 6: mod_base = um
  modified_base 7: mod_base = OTHER; note = 2' Fluoro-uridine
  modified_base 8: mod_base = OTHER; note = 2'O-methyl-adenosine
  modified_base 9: mod_base = OTHER; note = Af
  modified_base 10: mod_base = OTHER; note = 2' Fluoro-uridine
  modified_base 11: mod_base = OTHER; note = 2' Fluoro-cytidine
  modified_base 12: mod_base = OTHER; note = 2' Fluoro-cytidine
  modified_base 13: mod_base = um
  modified_base 14: mod_base = gm
  modified_base 15: mod_base = OTHER; note = 2'O-methyl-adenosine
  modified_base 16: mod_base = OTHER; note = 2'O-methyl-adenosine
  modified_base 17: mod_base = OTHER; note = 2'O-methyl-adenosine
  modified_base 18: mod_base = cm
  modified_base 19: mod_base = cm
  modified_base 20: mod_base = OTHER; note = 2'O-methyl-adenosine
  modified_base 21: mod_base = OTHER; note = 2'O-methyl-adenosine
  misc_feature 1^2: note = phosphorothioate linkage
  misc_feature 2^3: note = phosphorothioate linkage
tgagattaatcctgaaaccaa

SEQ ID NO: 729 - RNA, 21 nt, synthetic construct
  source 1..21: mol_type = other RNA
  misc_feature 1..21: note = Description: ZPI siRNA sense strand: ETXS965; corresponding to SEQ ID NO: 249
  modified_base 1: mod_base = um
  modified_base 2: mod_base = gm
  modified_base 3: mod_base = OTHER; note = 2'O-methyl-adenosine
  modified_base 4: mod_base = um
  modified_base 5: mod_base = gm
  modified_base 6: mod_base = OTHER; note = 2'O-methyl-adenosine
  modified_base 7: mod_base = OTHER; note = 2' Fluoro-guanosine
  modified_base 8: mod_base = OTHER; note = 2'O-methyl-adenosine
  modified_base 9: mod_base = OTHER; note = 2' Fluoro-uridine
  modified_base 10: mod_base = OTHER; note = 2' Fluoro-uridine
  modified_base 11: mod_base = OTHER; note = Af
  modified_base 12: mod_base = OTHER; note = Af
  modified_base 13: mod_base = um
  modified_base 14: mod_base = cm
  modified_base 15: mod_base = cm
  modified_base 16: mod_base = um
  modified_base 17: mod_base = gm
  modified_base 18: mod_base = OTHER; note = 2'O-methyl-adenosine
  modified_base 19: mod_base = OTHER; note = 2'O-methyl-adenosine
  modified_base 20: mod_base = OTHER; note = 2'O-methyl-adenosine
  modified_base 21: mod_base = cm
  misc_feature 1^2: note = phosphorothioate linkage
  misc_feature 2^3: note = phosphorothioate linkage
tgatgagattaatcctgaaac

SEQ ID NO: 730 - RNA, 21 nt, synthetic construct
  source 1..21: mol_type = other RNA
  misc_feature 1..21: note = Description: ZPI siRNA sense strand: ETXS967; corresponding to SEQ ID NO: 250
  modified_base 1: mod_base = OTHER; note = 2'O-methyl-adenosine
  modified_base 2: mod_base = um
  modified_base 3: mod_base = gm
  modified_base 4: mod_base = OTHER; note = 2'O-methyl-adenosine
  modified_base 5: mod_base = gm
  modified_base 6: mod_base = OTHER; note = 2'O-methyl-adenosine
  modified_base 7: mod_base = OTHER; note = 2' Fluoro-uridine
  modified_base 8: mod_base = um
  modified_base 9: mod_base = OTHER; note = Af
  modified_base 10: mod_base = OTHER; note = Af
  modified_base 11: mod_base = OTHER; note = 2' Fluoro-uridine
  modified_base 12: mod_base = OTHER; note = 2' Fluoro-cytidine
  modified_base 13: mod_base = cm
  modified_base 14: mod_base = um
  modified_base 15: mod_base = gm
  modified_base 16: mod_base = OTHER; note = 2'O-methyl-adenosine
  modified_base 17: mod_base = OTHER; note = 2'O-methyl-adenosine
  modified_base 18: mod_base = OTHER; note = 2'O-methyl-adenosine
  modified_base 19: mod_base = cm
  modified_base 20: mod_base = cm
  modified_base 21: mod_base = OTHER; note = 2'O-methyl-adenosine
  misc_feature 1^2: note = phosphorothioate linkage
  misc_feature 2^3: note = phosphorothioate linkage
atgagattaatcctgaaacca

SEQ ID NO: 731 - RNA, 21 nt, synthetic construct
  source 1..21: mol_type = other RNA
  misc_feature 1..21: note = Description: ZPI siRNA sense strand: ETXS969; corresponding to SEQ ID NO: 251
  modified_base 1: mod_base = gm
  modified_base 2: mod_base = OTHER; note = 2'O-methyl-adenosine
  modified_base 3: mod_base = um
  modified_base 4: mod_base = gm
  modified_base 5: mod_base = OTHER; note = 2'O-methyl-adenosine
  modified_base 6: mod_base = gm
  modified_base 7: mod_base = OTHER; note = Af
  modified_base 8: mod_base = um
  modified_base 9: mod_base = OTHER; note = 2' Fluoro-uridine
  modified_base 10: mod_base = OTHER; note = Af
  modified_base 11: mod_base = OTHER; note = Af
  modified_base 12: mod_base = OTHER; note = 2' Fluoro-uridine
  modified_base 13: mod_base = cm
  modified_base 14: mod_base = cm
  modified_base 15: mod_base = um
  modified_base 16: mod_base = gm
  modified_base 17: mod_base = OTHER; note = 2'O-methyl-adenosine
  modified_base 18: mod_base = OTHER; note = 2'O-methyl-adenosine
  modified_base 19: mod_base = OTHER; note = 2'O-methyl-adenosine
  modified_base 20: mod_base = cm
  modified_base 21: mod_base = cm
  misc_feature 1^2: note = phosphorothioate linkage
  misc_feature 2^3: note = phosphorothioate linkage
gatgagattaatcctgaaacc

SEQ ID NO: 732 - RNA, 21 nt, synthetic construct
  source 1..21: mol_type = other RNA
  misc_feature 1..21: note = Description: ZPI siRNA sense strand: ETXS971; corresponding to SEQ ID NO: 252
  modified_base 1: mod_base = cm
  modified_base 2: mod_base = um
  modified_base 3: mod_base = gm
  modified_base 4: mod_base = um
  modified_base 5: mod_base = um
  modified_base 6: mod_base = um
  modified_base 7: mod_base = OTHER; note = 2' Fluoro-guanosine
  modified_base 8: mod_base = OTHER; note = 2'O-methyl-adenosine
  modified_base 9: mod_base = OTHER; note = 2' Fluoro-uridine
  modified_base 10: mod_base = OTHER; note = 2' Fluoro-guanosine
  modified_base 11: mod_base = OTHER; note = Af
  modified_base 12: mod_base = OTHER; note = 2' Fluoro-guanosine
  modified_base 13: mod_base = OTHER; note = 2'O-methyl-adenosine
  modified_base 14: mod_base = um
  modified_base 15: mod_base = um
  modified_base 16: mod_base = OTHER; note = 2'O-methyl-adenosine
  modified_base 17: mod_base = OTHER; note = 2'O-methyl-adenosine
  modified_base 18: mod_base = um
  modified_base 19: mod_base = cm
  modified_base 20: mod_base = cm
  modified_base 21: mod_base = um
  misc_feature 1^2: note = phosphorothioate linkage
  misc_feature 2^3: note = phosphorothioate linkage
ctgtttgatgagattaatcct

SEQ ID NO: 733 - RNA, 21 nt, synthetic construct
  source 1..21: mol_type = other RNA
  misc_feature 1..21: note = Description: ZPI siRNA sense strand: ETXS973; corresponding to SEQ ID NO: 253
  modified_base 1: mod_base = um
  modified_base 2: mod_base = um
  modified_base 3: mod_base = um
  modified_base 4: mod_base = um
  modified_base 5: mod_base = gm
  modified_base 6: mod_base = cm
  modified_base 7: mod_base = OTHER; note = 2' Fluoro-cytidine
  modified_base 8: mod_base = um
  modified_base 9: mod_base = OTHER; note = 2' Fluoro-uridine
  modified_base 10: mod_base = OTHER; note = 2' Fluoro-cytidine
  modified_base 11: mod_base = OTHER; note = Af
  modified_base 12: mod_base = OTHER; note = 2' Fluoro-uridine
  modified_base 13: mod_base = cm
  modified_base 14: mod_base = cm
  modified_base 15: mod_base = OTHER; note = 2'O-methyl-adenosine
  modified_base 16: mod_base = cm
  modified_base 17: mod_base = OTHER; note = 2'O-methyl-adenosine
  modified_base 18: mod_base = OTHER; note = 2'O-methyl-adenosine
  modified_base 19: mod_base = gm
  modified_base 20: mod_base = gm
  modified_base 21: mod_base = OTHER; note = 2'O-methyl-adenosine
  misc_feature 1^2: note = phosphorothioate linkage
  misc_feature 2^3: note = phosphorothioate linkage
ttttgccttcatccacaagga

SEQ ID NO: 734 - RNA, 21 nt, synthetic construct
  source 1..21: mol_type = other RNA
  misc_feature 1..21: note = Description: ZPI siRNA sense strand: ETXS975; corresponding to SEQ ID NO: 254
  modified_base 1: mod_base = cm
  modified_base 2: mod_base = gm
  modified_base 3: mod_base = OTHER; note = 2'O-methyl-adenosine
  modified_base 4: mod_base = OTHER; note = 2'O-methyl-adenosine
  modified_base 5: mod_base = OTHER; note = 2'O-methyl-adenosine
  modified_base 6: mod_base = gm
  modified_base 7: mod_base = OTHER; note = Af
  modified_base 8: mod_base = um
  modified_base 9: mod_base = OTHER; note = 2' Fluoro-cytidine
  modified_base 10: mod_base = OTHER; note = 2' Fluoro-uridine
  modified_base 11: mod_base = OTHER; note = 2' Fluoro-cytidine
  modified_base 12: mod_base = OTHER; note = 2' Fluoro-cytidine
  modified_base 13: mod_base = OTHER; note = 2'O-methyl-adenosine
  modified_base 14: mod_base = um
  modified_base 15: mod_base = gm
  modified_base 16: mod_base = OTHER; note = 2'O-methyl-adenosine
  modified_base 17: mod_base = gm
  modified_base 18: mod_base = gm
  modified_base 19: mod_base = cm
  modified_base 20: mod_base = OTHER; note = 2'O-methyl-adenosine
  modified_base 21: mod_base = cm
  misc_feature 1^2: note = phosphorothioate linkage
  misc_feature 2^3: note = phosphorothioate linkage
cgaaagatctccatgaggcac

SEQ ID NO: 735 - RNA, 21 nt, synthetic construct
  source 1..21: mol_type = other RNA
  misc_feature 1..21: note = Description: ZPI siRNA sense strand: ETXS977; corresponding to SEQ ID NO: 255
  modified_base 1: mod_base = um
  modified_base 2: mod_base = gm
  modified_base 3: mod_base = cm
  modified_base 4: mod_base = um
  modified_base 5: mod_base = gm
  modified_base 6: mod_base = gm
  modified_base 7: mod_base = OTHER; note = 2' Fluoro-uridine
  modified_base 8: mod_base = gm
  modified_base 9: mod_base = OTHER; note = 2' Fluoro-guanosine
  modified_base 10: mod_base = OTHER; note = 2' Fluoro-uridine
  modified_base 11: mod_base = OTHER; note = 2' Fluoro-cytidine
  modified_base 12: mod_base = OTHER; note = 2' Fluoro-cytidine
  modified_base 13: mod_base = um
  modified_base 14: mod_base = cm
  modified_base 15: mod_base = OTHER; note = 2'O-methyl-adenosine
  modified_base 16: mod_base = um
  modified_base 17: mod_base = gm
  modified_base 18: mod_base = gm
  modified_base 19: mod_base = OTHER; note = 2'O-methyl-adenosine
  modified_base 20: mod_base = gm
  modified_base 21: mod_base = OTHER; note = 2'O-methyl-adenosine
  misc_feature 1^2: note = phosphorothioate linkage
  misc_feature 2^3: note = phosphorothioate linkage
tgctggtggtcctcatggaga

SEQ ID NO: 736 - RNA, 21 nt, synthetic construct
  source 1..21: mol_type = other RNA
  misc_feature 1..21: note = Description: ZPI siRNA sense strand: ETXS979; corresponding to SEQ ID NO: 256
  modified_base 1: mod_base = cm
  modified_base 2: mod_base = cm
  modified_base 3: mod_base = um
  modified_base 4: mod_base = um
  modified_base 5: mod_base = cm
  modified_base 6: mod_base = OTHER; note = 2'O-methyl-adenosine
  modified_base 7: mod_base = OTHER; note = 2' Fluoro-uridine
  modified_base 8: mod_base = cm
  modified_base 9: mod_base = OTHER; note = 2' Fluoro-cytidine
  modified_base 10: mod_base = OTHER; note = Af
  modified_base 11: mod_base = OTHER; note = 2' Fluoro-cytidine
  modified_base 12: mod_base = OTHER; note = Af
  modified_base 13: mod_base = OTHER; note = 2'O-methyl-adenosine
  modified_base 14: mod_base = gm
  modified_base 15: mod_base = gm
  modified_base 16: mod_base = OTHER; note = 2'O-methyl-adenosine
  modified_base 17: mod_base = um
  modified_base 18: mod_base = um
  modified_base 19: mod_base = um
  modified_base 20: mod_base = um
  modified_base 21: mod_base = gm
  misc_feature 1^2: note = phosphorothioate linkage
  misc_feature 2^3: note = phosphorothioate linkage
ccttcatccacaaggattttg

SEQ ID NO: 737 - RNA, 21 nt, synthetic construct
  source 1..21: mol_type = other RNA
  misc_feature 1..21: note = Description: ZPI siRNA sense strand: ETXS981; corresponding to SEQ ID NO: 257
  modified_base 1: mod_base = gm
  modified_base 2: mod_base = OTHER; note = 2'O-methyl-adenosine
  modified_base 3: mod_base = OTHER; note = 2'O-methyl-adenosine
  modified_base 4: mod_base = OTHER; note = 2'O-methyl-adenosine
  modified_base 5: mod_base = gm
  modified_base 6: mod_base = OTHER; note = 2'O-methyl-adenosine
  modified_base 7: mod_base = OTHER; note = 2' Fluoro-uridine
  modified_base 8: mod_base = cm
  modified_base 9: mod_base = OTHER; note = 2' Fluoro-uridine
  modified_base 10: mod_base = OTHER; note = 2' Fluoro-cytidine
  modified_base 11: mod_base = OTHER; note = 2' Fluoro-cytidine
  modified_base 12: mod_base = OTHER; note = Af
  modified_base 13: mod_base = um
  modified_base 14: mod_base = gm
  modified_base 15: mod_base = OTHER; note = 2'O-methyl-adenosine
  modified_base 16: mod_base = gm
  modified_base 17: mod_base = gm
  modified_base 18: mod_base = cm
  modified_base 19: mod_base = OTHER; note = 2'O-methyl-adenosine
  modified_base 20: mod_base = cm
  modified_base 21: mod_base = gm
  misc_feature 1^2: note = phosphorothioate linkage
  misc_feature 2^3: note = phosphorothioate linkage
gaaagatctccatgaggcacg

SEQ ID NO: 738 - RNA, 21 nt, synthetic construct
  source 1..21: mol_type = other RNA
  misc_feature 1..21: note = Description: ZPI siRNA sense strand: ETXS983; corresponding to SEQ ID NO: 258
  modified_base 1: mod_base = um
  modified_base 2: mod_base = um
  modified_base 3: mod_base = cm
  modified_base 4: mod_base = OTHER; note = 2'O-methyl-adenosine
  modified_base 5: mod_base = um
  modified_base 6: mod_base = cm
  modified_base 7: mod_base = OTHER; note = 2' Fluoro-cytidine
  modified_base 8: mod_base = OTHER; note = 2'O-methyl-adenosine
  modified_base 9: mod_base = OTHER; note = 2' Fluoro-cytidine
  modified_base 10: mod_base = OTHER; note = Af
  modified_base 11: mod_base = OTHER; note = Af
  modified_base 12: mod_base = OTHER; note = 2' Fluoro-guanosine
  modified_base 13: mod_base = gm
  modified_base 14: mod_base = OTHER; note = 2'O-methyl-adenosine
  modified_base 15: mod_base = um
  modified_base 16: mod_base = um
  modified_base 17: mod_base = um
  modified_base 18: mod_base = um
  modified_base 19: mod_base = gm
  modified_base 20: mod_base = OTHER; note = 2'O-methyl-adenosine
  modified_base 21: mod_base = um
  misc_feature 1^2: note = phosphorothioate linkage
  misc_feature 2^3: note = phosphorothioate linkage
ttcatccacaaggattttgat

SEQ ID NO: 739 - RNA, 21 nt, synthetic construct
  source 1..21: mol_type = other RNA
  misc_feature 1..21: note = Description: ZPI siRNA sense strand: ETXS985; corresponding to SEQ ID NO: 259
  modified_base 1: mod_base = um
  modified_base 2: mod_base = um
  modified_base 3: mod_base = um
  modified_base 4: mod_base = gm
  modified_base 5: mod_base = OTHER; note = 2'O-methyl-adenosine
  modified_base 6: mod_base = um
  modified_base 7: mod_base = OTHER; note = 2' Fluoro-guanosine
  modified_base 8: mod_base = OTHER; note = 2'O-methyl-adenosine
  modified_base 9: mod_base = OTHER; note = 2' Fluoro-guanosine
  modified_base 10: mod_base = OTHER; note = Af
  modified_base 11: mod_base = OTHER; note = 2' Fluoro-uridine
  modified_base 12: mod_base = OTHER; note = 2' Fluoro-uridine
  modified_base 13: mod_base = OTHER; note = 2'O-methyl-adenosine
  modified_base 14: mod_base = OTHER; note = 2'O-methyl-adenosine
  modified_base 15: mod_base = um
  modified_base 16: mod_base = cm
  modified_base 17: mod_base = cm
  modified_base 18: mod_base = um
  modified_base 19: mod_base = gm
  modified_base 20: mod_base = OTHER; note = 2'O-methyl-adenosine
  modified_base 21: mod_base = OTHER; note = 2'O-methyl-adenosine
  misc_feature 1^2: note = phosphorothioate linkage
  misc_feature 2^3: note = phosphorothioate linkage
tttgatgagattaatcctgaa

SEQ ID NO: 740 - RNA, 21 nt, synthetic construct
  source 1..21: mol_type = other RNA
  misc_feature 1..21: note = Description: ZPI siRNA sense strand: ETXS987; corresponding to SEQ ID NO: 260
  modified_base 1: mod_base = um
  modified_base 2: mod_base = um
  modified_base 3: mod_base = gm
  modified_base 4: mod_base = cm
  modified_base 5: mod_base = cm
  modified_base 6: mod_base = um
  modified_base 7: mod_base = OTHER; note = 2' Fluoro-uridine
  modified_base 8: mod_base = cm
  modified_base 9: mod_base = OTHER; note = Af
  modified_base 10: mod_base = OTHER; note = 2' Fluoro-uridine
  modified_base 11: mod_base = OTHER; note = 2' Fluoro-cytidine
  modified_base 12: mod_base = OTHER; note = 2' Fluoro-cytidine
  modified_base 13: mod_base = OTHER; note = 2'O-methyl-adenosine
  modified_base 14: mod_base = cm
  modified_base 15: mod_base = OTHER; note = 2'O-methyl-adenosine
  modified_base 16: mod_base = OTHER; note = 2'O-methyl-adenosine
  modified_base 17: mod_base = gm
  modified_base 18: mod_base = gm
  modified_base 19: mod_base = OTHER; note = 2'O-methyl-adenosine
  modified_base 20: mod_base = um
  modified_base 21: mod_base = um
  misc_feature 1^2: note = phosphorothioate linkage
  misc_feature 2^3: note = phosphorothioate linkage
ttgccttcatccacaaggatt

SEQ ID NO: 741 - RNA, 21 nt, synthetic construct
  source 1..21: mol_type = other RNA
  misc_feature 1..21: note = Description: ZPI siRNA sense strand: ETXS989; corresponding to SEQ ID NO: 261
  modified_base 1: mod_base = gm
  modified_base 2: mod_base = OTHER; note = 2'O-methyl-adenosine
  modified_base 3: mod_base = um
  modified_base 4: mod_base = cm
  modified_base 5: mod_base = um
  modified_base 6: mod_base = cm
  modified_base 7: mod_base = OTHER; note = 2' Fluoro-cytidine
  modified_base 8: mod_base = OTHER; note = 2'O-methyl-adenosine
  modified_base 9: mod_base = OTHER; note = 2' Fluoro-uridine
  modified_base 10: mod_base = OTHER; note = 2' Fluoro-guanosine
  modified_base 11: mod_base = OTHER; note = Af
  modified_base 12: mod_base = OTHER; note = 2' Fluoro-guanosine
  modified_base 13: mod_base = gm
  modified_base 14: mod_base = cm
  modified_base 15: mod_base = OTHER; note = 2'O-methyl-adenosine
  modified_base 16: mod_base = cm
  modified_base 17: mod_base = gm
  modified_base 18: mod_base = OTHER; note = 2'O-methyl-adenosine
  modified_base 19: mod_base = um
  modified_base 20: mod_base = gm
  modified_base 21: mod_base = gm
  misc_feature 1^2: note = phosphorothioate linkage
  misc_feature 2^3: note = phosphorothioate linkage
gatctccatgaggcacgatgg

SEQ ID NO: 742 - RNA, 21 nt, synthetic construct
  source 1..21: mol_type = other RNA
  misc_feature 1..21: note = Description: ZPI siRNA sense strand: ETXS991; corresponding to SEQ ID NO: 242
  modified_base 1: mod_base = um
  modified_base 2: mod_base = gm
  modified_base 3: mod_base = cm
  modified_base 4: mod_base = cm
  modified_base 5: mod_base = um
  modified_base 6: mod_base = um
  modified_base 7: mod_base = OTHER; note = 2' Fluoro-cytidine
  modified_base 8: mod_base = OTHER; note = 2'O-methyl-adenosine
  modified_base 9: mod_base = OTHER; note = 2' Fluoro-uridine
  modified_base 10: mod_base = OTHER; note = 2' Fluoro-cytidine
  modified_base 11: mod_base = OTHER; note = 2' Fluoro-cytidine
  modified_base 12: mod_base = OTHER; note = Af
  modified_base 13: mod_base = cm
  modified_base 14: mod_base = OTHER; note = 2'O-methyl-adenosine
  modified_base 15: mod_base = OTHER; note = 2'O-methyl-adenosine
  modified_base 16: mod_base = gm
  modified_base 17: mod_base = gm
  modified_base 18: mod_base = OTHER; note = 2'O-methyl-adenosine
  modified_base 19: mod_base = um
  modified_base 20: mod_base = um
  modified_base 21: mod_base = um
  misc_feature 1^2: note = phosphorothioate linkage
  misc_feature 2^3: note = phosphorothioate linkage
tgccttcatccacaaggattt

SEQ ID NO: 743 - RNA, 21 nt, synthetic construct
  source 1..21: mol_type = other RNA
  misc_feature 1..21: note = Description: ZPI siRNA sense strand: ETXS993; corresponding to SEQ ID NO: 243
  modified_base 1: mod_base = um
  modified_base 2: mod_base = gm
  modified_base 3: mod_base = cm
  modified_base 4: mod_base = gm
  modified_base 5: mod_base = OTHER; note = 2'O-methyl-adenosine
  modified_base 6: mod_base = OTHER; note = 2'O-methyl-adenosine
  modified_base 7: mod_base = OTHER; note = Af
  modified_base 8: mod_base = gm
  modified_base 9: mod_base = OTHER; note = Af
  modified_base 10: mod_base = OTHER; note = 2' Fluoro-uridine
  modified_base 11: mod_base = OTHER; note = 2' Fluoro-cytidine
  modified_base 12: mod_base = OTHER; note = 2' Fluoro-uridine
  modified_base 13: mod_base = cm
  modified_base 14: mod_base = cm
  modified_base 15: mod_base = OTHER; note = 2'O-methyl-adenosine
  modified_base 16: mod_base = um
  modified_base 17: mod_base = gm
  modified_base 18: mod_base = OTHER; note = 2'O-methyl-adenosine
  modified_base 19: mod_base = gm
  modified_base 20: mod_base = gm
  modified_base 21: mod_base = cm
  misc_feature 1^2: note = phosphorothioate linkage
  misc_feature 2^3: note = phosphorothioate linkage
tgcgaaagatctccatgaggc

SEQ ID NO: 744 - RNA, 21 nt, synthetic construct
  source 1..21: mol_type = other RNA
  misc_feature 1..21: note = Description: ZPI siRNA sense strand: ETXS995; corresponding to SEQ ID NO: 244
  modified_base 1: mod_base = gm
  modified_base 2: mod_base = cm
  modified_base 3: mod_base = um
  modified_base 4: mod_base = gm
  modified_base 5: mod_base = gm
  modified_base 6: mod_base = um
  modified_base 7: mod_base = OTHER; note = 2' Fluoro-guanosine
  modified_base 8: mod_base = gm
  modified_base 9: mod_base = OTHER; note = 2' Fluoro-uridine
  modified_base 10: mod_base = OTHER; note = 2' Fluoro-cytidine
  modified_base 11: mod_base = OTHER; note = 2' Fluoro-cytidine
  modified_base 12: mod_base = OTHER; note = 2' Fluoro-uridine
  modified_base 13: mod_base = cm
  modified_base 14: mod_base = OTHER; note = 2'O-methyl-adenosine
  modified_base 15: mod_base = um
  modified_base 16: mod_base = gm
  modified_base 17: mod_base = gm
  modified_base 18: mod_base = OTHER; note = 2'O-methyl-adenosine
  modified_base 19: mod_base = gm
  modified_base 20: mod_base = OTHER; note = 2'O-methyl-adenosine
  modified_base 21: mod_base = OTHER; note = 2'O-methyl-adenosine
  misc_feature 1^2: note = phosphorothioate linkage
  misc_feature 2^3: note = phosphorothioate linkage
gctggtggtcctcatggagaa

SEQ ID NO: 745 - RNA, 21 nt, synthetic construct
  source 1..21: mol_type = other RNA
  misc_feature 1..21: note = Description: ZPI siRNA sense strand: ETXS997; corresponding to SEQ ID NO: 245
  modified_base 1: mod_base = gm
  modified_base 2: mod_base = cm
  modified_base 3: mod_base = gm
  modified_base 4: mod_base = OTHER; note = 2'O-methyl-adenosine
  modified_base 5: mod_base = OTHER; note = 2'O-methyl-adenosine
  modified_base 6: mod_base = OTHER; note = 2'O-methyl-adenosine
  modified_base 7: mod_base = OTHER; note = 2' Fluoro-guanosine
  modified_base 8: mod_base = OTHER; note = 2'O-methyl-adenosine
  modified_base 9: mod_base = OTHER; note = 2' Fluoro-uridine
  modified_base 10: mod_base = OTHER; note = 2' Fluoro-cytidine
  modified_base 11: mod_base = OTHER; note = 2' Fluoro-uridine
  modified_base 12: mod_base = OTHER; note = 2' Fluoro-cytidine
  modified_base 13: mod_base = cm
  modified_base 14: mod_base = OTHER; note = 2'O-methyl-adenosine
  modified_base 15: mod_base = um
  modified_base 16: mod_base = gm
  modified_base 17: mod_base = OTHER; note = 2'O-methyl-adenosine
  modified_base 18: mod_base = gm
  modified_base 19: mod_base = gm
  modified_base 20: mod_base = cm
  modified_base 21: mod_base = OTHER; note = 2'O-methyl-adenosine
  misc_feature 1^2: note = phosphorothioate linkage
  misc_feature 2^3: note = phosphorothioate linkage
gcgaaagatctccatgaggca

SEQ ID NO: 746 - RNA, 21 nt, synthetic construct
  source 1..21: mol_type = other RNA
  misc_feature 1..21: note = Description: ZPI siRNA sense strand: ETXS999; corresponding to SEQ ID NO: 246
  modified_base 1: mod_base = gm
  modified_base 2: mod_base = um
  modified_base 3: mod_base = OTHER; note = 2'O-methyl-adenosine
  modified_base 4: mod_base = um
  modified_base 5: mod_base = gm
  modified_base 6: mod_base = OTHER; note = 2'O-methyl-adenosine
  modified_base 7: mod_base = OTHER; note = 2' Fluoro-guanosine
  modified_base 8: mod_base = OTHER; note = 2'O-methyl-adenosine
  modified_base 9: mod_base = OTHER; note = 2' Fluoro-uridine
  modified_base 10: mod_base = OTHER; note = 2' Fluoro-guanosine
  modified_base 11: mod_base = OTHER; note = 2' Fluoro-cytidine
  modified_base 12: mod_base = OTHER; note = Af
  modified_base 13: mod_base = um
  modified_base 14: mod_base = gm
  modified_base 15: mod_base = OTHER; note = 2'O-methyl-adenosine
  modified_base 16: mod_base = gm
  modified_base 17: mod_base = cm
  modified_base 18: mod_base = um
  modified_base 19: mod_base = gm
  modified_base 20: mod_base = cm
  modified_base 21: mod_base = um
  misc_feature 1^2: note = phosphorothioate linkage
  misc_feature 2^3: note = phosphorothioate linkage
gtatgagatgcatgagctgct

SEQ ID NO: 747 - RNA, 21 nt, synthetic construct
  source 1..21: mol_type = other RNA
  misc_feature 1..21: note = Description: ZPI siRNA sense strand: ETXS1001; corresponding to SEQ ID NO: 247
  modified_base 1: mod_base = gm
  modified_base 2: mod_base = um
  modified_base 3: mod_base = um
  modified_base 4: mod_base = um
  modified_base 5: mod_base = gm
  modified_base 6: mod_base = OTHER; note = 2'O-methyl-adenosine
  modified_base 7: mod_base = OTHER; note = 2' Fluoro-uridine
  modified_base 8: mod_base = gm
  modified_base 9: mod_base = OTHER; note = Af
  modified_base 10: mod_base = OTHER; note = 2' Fluoro-guanosine
  modified_base 11: mod_base = OTHER; note = Af
  modified_base 12: mod_base = OTHER; note = 2' Fluoro-uridine
  modified_base 13: mod_base = um
  modified_base 14: mod_base = OTHER; note = 2'O-methyl-adenosine
  modified_base 15: mod_base = OTHER; note = 2'O-methyl-adenosine
  modified_base 16: mod_base = um
  modified_base 17: mod_base = cm
  modified_base 18: mod_base = cm
  modified_base 19: mod_base = um
  modified_base 20: mod_base = gm
  modified_base 21: mod_base = OTHER; note = 2'O-methyl-adenosine
  misc_feature 1^2: note = phosphorothioate linkage
  misc_feature 2^3: note = phosphorothioate linkage
gtttgatgagattaatcctga

SEQ ID NO: 748 - RNA, 21 nt, synthetic construct
  source 1..21: mol_type = other RNA
  misc_feature 1..21: note = Description: ZPI siRNA sense strand: ETXS1003; corresponding to SEQ ID NO: 248
  modified_base 1: mod_base = um
  modified_base 2: mod_base = gm
  modified_base 3: mod_base = OTHER; note = 2'O-methyl-adenosine
  modified_base 4: mod_base = gm
  modified_base 5: mod_base = OTHER; note = 2'O-methyl-adenosine
  modified_base 6: mod_base = um
  modified_base 7: mod_base = OTHER; note = 2' Fluoro-uridine
  modified_base 8: mod_base = OTHER; note = 2'O-methyl-adenosine
  modified_base 9: mod_base = OTHER; note = Af
  modified_base 10: mod_base = OTHER; note = 2' Fluoro-uridine
  modified_base 11: mod_base = OTHER; note = 2' Fluoro-cytidine
  modified_base 12: mod_base = OTHER; note = 2' Fluoro-cytidine
  modified_base 13: mod_base = um
  modified_base 14: mod_base = gm
  modified_base 15: mod_base = OTHER; note = 2'O-methyl-adenosine
  modified_base 16: mod_base = OTHER; note = 2'O-methyl-adenosine
  modified_base 17: mod_base = OTHER; note = 2'O-methyl-adenosine
  modified_base 18: mod_base = cm
  modified_base 19: mod_base = cm
  modified_base 20: mod_base = OTHER; note = 2'O-methyl-adenosine
  modified_base 21: mod_base = OTHER; note = 2'O-methyl-adenosine
  misc_feature 1^2: note = phosphorothioate linkage
  misc_feature 2^3: note = phosphorothioate linkage
tgagattaatcctgaaaccaa

SEQ ID NO: 749 - RNA, 21 nt, synthetic construct
  source 1..21: mol_type = other RNA
  misc_feature 1..21: note = Description: ZPI siRNA sense strand: ETXS1005; corresponding to SEQ ID NO: 249
  modified_base 1: mod_base = um
  modified_base 2: mod_base = gm
  modified_base 3: mod_base = OTHER; note = 2'O-methyl-adenosine
  modified_base 4: mod_base = um
  modified_base 5: mod_base = gm
  modified_base 6: mod_base = OTHER; note = 2'O-methyl-adenosine
  modified_base 7: mod_base = OTHER; note = 2' Fluoro-guanosine
  modified_base 8: mod_base = OTHER; note = 2'O-methyl-adenosine
  modified_base 9: mod_base = OTHER; note = 2' Fluoro-uridine
  modified_base 10: mod_base = OTHER; note = 2' Fluoro-uridine
  modified_base 11: mod_base = OTHER; note = Af
  modified_base 12: mod_base = OTHER; note = Af
  modified_base 13: mod_base = um
  modified_base 14: mod_base = cm
  modified_base 15: mod_base = cm
  modified_base 16: mod_base = um
  modified_base 17: mod_base = gm
  modified_base 18: mod_base = OTHER; note = 2'O-methyl-adenosine
  modified_base 19: mod_base = OTHER; note = 2'O-methyl-adenosine
  modified_base 20: mod_base = OTHER; note = 2'O-methyl-adenosine
  modified_base 21: mod_base = cm
  misc_feature 1^2: note = phosphorothioate linkage
  misc_feature 2^3: note = phosphorothioate linkage
tgatgagattaatcctgaaac

SEQ ID NO: 750 - RNA, 21 nt, synthetic construct
  source 1..21: mol_type = other RNA
  misc_feature 1..21: note = Description: ZPI siRNA sense strand: ETXS1007; corresponding to SEQ ID NO: 250
  modified_base 1: mod_base = OTHER; note = 2'O-methyl-adenosine
  modified_base 2: mod_base = um
  modified_base 3: mod_base = gm
  modified_base 4: mod_base = OTHER; note = 2'O-methyl-adenosine
  modified_base 5: mod_base = gm
  modified_base 6: mod_base = OTHER; note = 2'O-methyl-adenosine
  modified_base 7: mod_base = OTHER; note = 2' Fluoro-uridine
  modified_base 8: mod_base = um
  modified_base 9: mod_base = OTHER; note = Af
  modified_base 10: mod_base = OTHER; note = Af
  modified_base 11: mod_base = OTHER; note = 2' Fluoro-uridine
  modified_base 12: mod_base = OTHER; note = 2' Fluoro-cytidine
  modified_base 13: mod_base = cm
  modified_base 14: mod_base = um
  modified_base 15: mod_base = gm
  modified_base 16: mod_base = OTHER; note = 2'O-methyl-adenosine
  modified_base 17: mod_base = OTHER; note = 2'O-methyl-adenosine
  modified_base 18: mod_base = OTHER; note = 2'O-methyl-adenosine
  modified_base 19: mod_base = cm
  modified_base 20: mod_base = cm
  modified_base 21: mod_base = OTHER; note = 2'O-methyl-adenosine
  misc_feature 1^2: note = phosphorothioate linkage
  misc_feature 2^3: note = phosphorothioate linkage
atgagattaatcctgaaacca

SEQ ID NO: 751 - RNA, 21 nt, synthetic construct
  source 1..21: mol_type = other RNA
  misc_feature 1..21: note = Description: ZPI siRNA sense strand: ETXS1009; corresponding to SEQ ID NO: 251
  modified_base 1: mod_base = gm
  modified_base 2: mod_base = OTHER; note = 2'O-methyl-adenosine
  modified_base 3: mod_base = um
  modified_base 4: mod_base = gm
  modified_base 5: mod_base = OTHER; note = 2'O-methyl-adenosine
  modified_base 6: mod_base = gm
  modified_base 7: mod_base = OTHER; note = Af
  modified_base 8: mod_base = um
  modified_base 9: mod_base = OTHER; note = 2' Fluoro-uridine
  modified_base 10: mod_base = OTHER; note = Af
  modified_base 11: mod_base = OTHER; note = Af
  modified_base 12: mod_base = OTHER; note = 2' Fluoro-uridine
  modified_base 13: mod_base = cm
  modified_base 14: mod_base = cm
  modified_base 15: mod_base = um
  modified_base 16: mod_base = gm
  modified_base 17: mod_base = OTHER; note = 2'O-methyl-adenosine
  modified_base 18: mod_base = OTHER; note = 2'O-methyl-adenosine
  modified_base 19: mod_base = OTHER; note = 2'O-methyl-adenosine
  modified_base 20: mod_base = cm
  modified_base 21: mod_base = cm
  misc_feature 1^2: note = phosphorothioate linkage
  misc_feature 2^3: note = phosphorothioate linkage
gatgagattaatcctgaaacc

SEQ ID NO: 752 - RNA, 21 nt, synthetic construct
  source 1..21: mol_type = other RNA
  misc_feature 1..21: note = Description: ZPI siRNA sense strand: ETXS1011; corresponding to SEQ ID NO: 252
  modified_base 1: mod_base = cm
  modified_base 2: mod_base = um
  modified_base 3: mod_base = gm
  modified_base 4: mod_base = um
  modified_base 5: mod_base = um
  modified_base 6: mod_base = um
  modified_base 7: mod_base = OTHER; note = 2' Fluoro-guanosine
  modified_base 8: mod_base = OTHER; note = 2'O-methyl-adenosine
  modified_base 9: mod_base = OTHER; note = 2' Fluoro-uridine
  modified_base 10: mod_base = OTHER; note = 2' Fluoro-guanosine
  modified_base 11: mod_base = OTHER; note = Af
  modified_base 12: mod_base = OTHER; note = 2' Fluoro-guanosine
  modified_base 13: mod_base = OTHER; note = 2'O-methyl-adenosine
  modified_base 14: mod_base = um
  modified_base 15: mod_base = um
  modified_base 16: mod_base = OTHER; note = 2'O-methyl-adenosine
  modified_base 17: mod_base = OTHER; note = 2'O-methyl-adenosine
  modified_base 18: mod_base = um
  modified_base 19: mod_base = cm
  modified_base 20: mod_base = cm
  modified_base 21: mod_base = um
  misc_feature 1^2: note = phosphorothioate linkage
  misc_feature 2^3: note = phosphorothioate linkage
ctgtttgatgagattaatcct

SEQ ID NO: 753 - RNA, 21 nt, synthetic construct
  source 1..21: mol_type = other RNA
  misc_feature 1..21: note = Description: ZPI siRNA sense strand: ETXS1013; corresponding to SEQ ID NO: 253
  modified_base 1: mod_base = um
  modified_base 2: mod_base = um
  modified_base 3: mod_base = um
  modified_base 4: mod_base = um
  modified_base 5: mod_base = gm
  modified_base 6: mod_base = cm
  modified_base 7: mod_base = OTHER; note = 2' Fluoro-cytidine
  modified_base 8: mod_base = um
  modified_base 9: mod_base = OTHER; note = 2' Fluoro-uridine
  modified_base 10: mod_base = OTHER; note = 2' Fluoro-cytidine
  modified_base 11: mod_base = OTHER; note = Af
  modified_base 12: mod_base = OTHER; note = 2' Fluoro-uridine
  modified_base 13: mod_base = cm
  modified_base 14: mod_base = cm
  modified_base 15: mod_base = OTHER; note = 2'O-methyl-adenosine
  modified_base 16: mod_base = cm
  modified_base 17: mod_base = OTHER; note = 2'O-methyl-adenosine
  modified_base 18: mod_base = OTHER; note = 2'O-methyl-adenosine
  modified_base 19: mod_base = gm
  modified_base 20: mod_base = gm
  modified_base 21: mod_base = OTHER; note = 2'O-methyl-adenosine
  misc_feature 1^2: note = phosphorothioate linkage
  misc_feature 2^3: note = phosphorothioate linkage
ttttgccttcatccacaagga

SEQ ID NO: 754 - RNA, 21 nt, synthetic construct
  source 1..21: mol_type = other RNA
  misc_feature 1..21: note = Description: ZPI siRNA sense strand: ETXS1015; corresponding to SEQ ID NO: 254
  modified_base 1: mod_base = cm
  modified_base 2: mod_base = gm
  modified_base 3: mod_base = OTHER; note = 2'O-methyl-adenosine
  modified_base 4: mod_base = OTHER; note = 2'O-methyl-adenosine
  modified_base 5: mod_base = OTHER; note = 2'O-methyl-adenosine
  modified_base 6: mod_base = gm
  modified_base 7: mod_base = OTHER; note = Af
  modified_base 8: mod_base = um
  modified_base 9: mod_base = OTHER; note = 2' Fluoro-cytidine
  modified_base 10: mod_base = OTHER; note = 2' Fluoro-uridine
  modified_base 11: mod_base = OTHER; note = 2' Fluoro-cytidine
  modified_base 12: mod_base = OTHER; note = 2' Fluoro-cytidine
  modified_base 13: mod_base = OTHER; note = 2'O-methyl-adenosine
  modified_base 14: mod_base = um
  modified_base 15: mod_base = gm
  modified_base 16: mod_base = OTHER; note = 2'O-methyl-adenosine
  modified_base 17: mod_base = gm
  modified_base 18: mod_base = gm
  modified_base 19: mod_base = cm
  modified_base 20: mod_base = OTHER; note = 2'O-methyl-adenosine
  modified_base 21: mod_base = cm
  misc_feature 1^2: note = phosphorothioate linkage
  misc_feature 2^3: note = phosphorothioate linkage
cgaaagatctccatgaggcac

SEQ ID NO: 755 - RNA, 21 nt, synthetic construct
  source 1..21: mol_type = other RNA
  misc_feature 1..21: note = Description: ZPI siRNA sense strand: ETXS1017; corresponding to SEQ ID NO: 255
  modified_base 1: mod_base = um
  modified_base 2: mod_base = gm
  modified_base 3: mod_base = cm
  modified_base 4: mod_base = um
  modified_base 5: mod_base = gm
  modified_base 6: mod_base = gm
  modified_base 7: mod_base = OTHER; note = 2' Fluoro-uridine
  modified_base 8: mod_base = gm
  modified_base 9: mod_base = OTHER; note = 2' Fluoro-guanosine
  modified_base 10: mod_base = OTHER; note = 2' Fluoro-uridine
  modified_base 11: mod_base = OTHER; note = 2' Fluoro-cytidine
  modified_base 12: mod_base = OTHER; note = 2' Fluoro-cytidine
  modified_base 13: mod_base = um
  modified_base 14: mod_base = cm
  modified_base 15: mod_base = OTHER; note = 2'O-methyl-adenosine
  modified_base 16: mod_base = um
  modified_base 17: mod_base = gm
  modified_base 18: mod_base = gm
  modified_base 19: mod_base = OTHER; note = 2'O-methyl-adenosine
  modified_base 20: mod_base = gm
  modified_base 21: mod_base = OTHER; note = 2'O-methyl-adenosine
  misc_feature 1^2: note = phosphorothioate linkage
  misc_feature 2^3: note = phosphorothioate linkage
tgctggtggtcctcatggaga

SEQ ID NO: 756 - RNA, 21 nt, synthetic construct
  source 1..21: mol_type = other RNA
  misc_feature 1..21: note = Description: ZPI siRNA sense strand: ETXS1019; corresponding to SEQ ID NO: 256
  modified_base 1: mod_base = cm
  modified_base 2: mod_base = cm
  modified_base 3: mod_base = um
  modified_base 4: mod_base = um
  modified_base 5: mod_base = cm
  modified_base 6: mod_base = OTHER; note = 2'O-methyl-adenosine
  modified_base 7: mod_base = OTHER; note = 2' Fluoro-uridine
  modified_base 8: mod_base = cm
  modified_base 9: mod_base = OTHER; note = 2' Fluoro-cytidine
  modified_base 10: mod_base = OTHER; note = Af
  modified_base 11: mod_base = OTHER; note = 2' Fluoro-cytidine
  modified_base 12: mod_base = OTHER; note = Af
  modified_base 13: mod_base = OTHER; note = 2'O-methyl-adenosine
  modified_base 14: mod_base = gm
  modified_base 15: mod_base = gm
  modified_base 16: mod_base = OTHER; note = 2'O-methyl-adenosine
  modified_base 17: mod_base = um
  modified_base 18: mod_base = um
  modified_base 19: mod_base = um
  modified_base 20: mod_base = um
  modified_base 21: mod_base = gm
  misc_feature 1^2: note = phosphorothioate linkage
  misc_feature 2^3: note = phosphorothioate linkage
ccttcatccacaaggattttg

SEQ ID NO: 757 - RNA, 21 nt, synthetic construct
  source 1..21: mol_type = other RNA
  misc_feature 1..21: note = Description: ZPI siRNA sense strand: ETXS1021; corresponding to SEQ ID NO: 257
  modified_base 1: mod_base = gm
  modified_base 2: mod_base = OTHER; note = 2'O-methyl-adenosine
  modified_base 3: mod_base = OTHER; note = 2'O-methyl-adenosine
  modified_base 4: mod_base = OTHER; note = 2'O-methyl-adenosine
  modified_base 5: mod_base = gm
  modified_base 6: mod_base = OTHER; note = 2'O-methyl-adenosine
  modified_base 7: mod_base = OTHER; note = 2' Fluoro-uridine
  modified_base 8: mod_base = cm
  modified_base 9: mod_base = OTHER; note = 2' Fluoro-uridine
  modified_base 10: mod_base = OTHER; note = 2' Fluoro-cytidine
  modified_base 11: mod_base = OTHER; note = 2' Fluoro-cytidine
  modified_base 12: mod_base = OTHER; note = Af
  modified_base 13: mod_base = um
  modified_base 14: mod_base = gm
  modified_base 15: mod_base = OTHER; note = 2'O-methyl-adenosine
  modified_base 16: mod_base = gm
  modified_base 17: mod_base = gm
  modified_base 18: mod_base = cm
  modified_base 19: mod_base = OTHER; note = 2'O-methyl-adenosine
  modified_base 20: mod_base = cm
  modified_base 21: mod_base = gm
  misc_feature 1^2: note = phosphorothioate linkage
  misc_feature 2^3: note = phosphorothioate linkage
gaaagatctccatgaggcacg

SEQ ID NO: 758 - RNA, 21 nt, synthetic construct
  source 1..21: mol_type = other RNA
  misc_feature 1..21: note = Description: ZPI siRNA sense strand: ETXS1023; corresponding to SEQ ID NO: 258
  modified_base 1: mod_base = um
  modified_base 2: mod_base = um
  modified_base 3: mod_base = cm
  modified_base 4: mod_base = OTHER; note = 2'O-methyl-adenosine
  modified_base 5: mod_base = um
  modified_base 6: mod_base = cm
  modified_base 7: mod_base = OTHER; note = 2' Fluoro-cytidine
  modified_base 8: mod_base = OTHER; note = 2'O-methyl-adenosine
  modified_base 9: mod_base = OTHER; note = 2' Fluoro-cytidine
  modified_base 10: mod_base = OTHER; note = Af
  modified_base 11: mod_base = OTHER; note = Af
  modified_base 12: mod_base = OTHER; note = 2' Fluoro-guanosine
  modified_base 13: mod_base = gm
  modified_base 14: mod_base = OTHER; note = 2'O-methyl-adenosine
  modified_base 15: mod_base = um
  modified_base 16: mod_base = um
  modified_base 17: mod_base = um
  modified_base 18: mod_base = um
  modified_base 19: mod_base = gm
  modified_base 20: mod_base = OTHER; note = 2'O-methyl-adenosine
  modified_base 21: mod_base = um
  misc_feature 1^2: note = phosphorothioate linkage
  misc_feature 2^3: note = phosphorothioate linkage
ttcatccacaaggattttgat

SEQ ID NO: 759 - RNA, 21 nt, synthetic construct
  source 1..21: mol_type = other RNA
  misc_feature 1..21: note = Description: ZPI siRNA sense strand: ETXS1025; corresponding to SEQ ID NO: 259
  modified_base 1: mod_base = um
  modified_base 2: mod_base = um
  modified_base 3: mod_base = um
  modified_base 4: mod_base = gm
  modified_base 5: mod_base = OTHER; note = 2'O-methyl-adenosine
  modified_base 6: mod_base = um
  modified_base 7: mod_base = OTHER; note = 2' Fluoro-guanosine
  modified_base 8: mod_base = OTHER; note = 2'O-methyl-adenosine
  modified_base 9: mod_base = OTHER; note = 2' Fluoro-guanosine
  modified_base 10: mod_base = OTHER; note = Af
  modified_base 11: mod_base = OTHER; note = 2' Fluoro-uridine
  modified_base 12: mod_base = OTHER; note = 2' Fluoro-uridine
  modified_base 13: mod_base = OTHER; note = 2'O-methyl-adenosine
  modified_base 14: mod_base = OTHER; note = 2'O-methyl-adenosine
  modified_base 15: mod_base = um
  modified_base 16: mod_base = cm
  modified_base 17: mod_base = cm
  modified_base 18: mod_base = um
  modified_base 19: mod_base = gm
  modified_base 20: mod_base = OTHER; note = 2'O-methyl-adenosine
  modified_base 21: mod_base = OTHER; note = 2'O-methyl-adenosine
  misc_feature 1^2: note = phosphorothioate linkage
  misc_feature 2^3: note = phosphorothioate linkage
tttgatgagattaatcctgaa

SEQ ID NO: 760 - RNA, 21 nt, synthetic construct
  source 1..21: mol_type = other RNA
  misc_feature 1..21: note = Description: ZPI siRNA sense strand: ETXS1027; corresponding to SEQ ID NO: 260
  modified_base 1: mod_base = um
  modified_base 2: mod_base = um
  modified_base 3: mod_base = gm
  modified_base 4: mod_base = cm
  modified_base 5: mod_base = cm
  modified_base 6: mod_base = um
  modified_base 7: mod_base = OTHER; note = 2' Fluoro-uridine
  modified_base 8: mod_base = cm
  modified_base 9: mod_base = OTHER; note = Af
  modified_base 10: mod_base = OTHER; note = 2' Fluoro-uridine
  modified_base 11: mod_base = OTHER; note = 2' Fluoro-cytidine
  modified_base 12: mod_base = OTHER; note = 2' Fluoro-cytidine
  modified_base 13: mod_base = OTHER; note = 2'O-methyl-adenosine
  modified_base 14: mod_base = cm
  modified_base 15: mod_base = OTHER; note = 2'O-methyl-adenosine
  modified_base 16: mod_base = OTHER; note = 2'O-methyl-adenosine
  modified_base 17: mod_base = gm
  modified_base 18: mod_base = gm
  modified_base 19: mod_base = OTHER; note = 2'O-methyl-adenosine
  modified_base 20: mod_base = um
  modified_base 21: mod_base = um
  misc_feature 1^2: note = phosphorothioate linkage
  misc_feature 2^3: note = phosphorothioate linkage
ttgccttcatccacaaggatt

SEQ ID NO: 761 - RNA, 21 nt, synthetic construct
  source 1..21: mol_type = other RNA
  misc_feature 1..21: note = Description: ZPI siRNA sense strand: ETXS1029; corresponding to SEQ ID NO: 261
  modified_base 1: mod_base = gm
  modified_base 2: mod_base = OTHER; note = 2'O-methyl-adenosine
  modified_base 3: mod_base = um
  modified_base 4: mod_base = cm
  modified_base 5: mod_base = um
  modified_base 6: mod_base = cm
  modified_base 7: mod_base = OTHER; note = 2' Fluoro-cytidine
  modified_base 8: mod_base = OTHER; note = 2'O-methyl-adenosine
  modified_base 9: mod_base = OTHER; note = 2' Fluoro-uridine
  modified_base 10: mod_base = OTHER; note = 2' Fluoro-guanosine
  modified_base 11: mod_base = OTHER; note = Af
  modified_base 12: mod_base = OTHER; note = 2' Fluoro-guanosine
  modified_base 13: mod_base = gm
  modified_base 14: mod_base = cm
  modified_base 15: mod_base = OTHER; note = 2'O-methyl-adenosine
  modified_base 16: mod_base = cm
  modified_base 17: mod_base = gm
  modified_base 18: mod_base = OTHER; note = 2'O-methyl-adenosine
  modified_base 19: mod_base = um
  modified_base 20: mod_base = gm
  modified_base 21: mod_base = gm
  misc_feature 1^2: note = phosphorothioate linkage
  misc_feature 2^3: note = phosphorothioate linkage
gatctccatgaggcacgatgg

SEQ ID NO: 762 - RNA, 23 nt, synthetic construct
  source 1..23: mol_type = other RNA
  misc_feature 1..23: note = Antisense: ETXS1032; corresponding to SEQ ID NO: 144
  modified_base 1: mod_base = OTHER; note = 2'O-methyl-adenosine
  modified_base 2: mod_base = OTHER; note = 2'Fluoro-adenosine
  modified_base 3: mod_base = OTHER; note = 2'O-methyl-adenosine
  modified_base 4: mod_base = OTHER; note = 2'Fluoro-adenosine
  modified_base 5: mod_base = um
  modified_base 6: mod_base = OTHER; note = 2' Fluoro-cytidine
  modified_base 7: mod_base = cm
  modified_base 8: mod_base = um
  modified_base 9: mod_base = um
  modified_base 10: mod_base = gm
  modified_base 11: mod_base = um
  modified_base 12: mod_base = gm
  modified_base 13: mod_base = gm
  modified_base 14: mod_base = OTHER; note = 2'Fluoro-adenosine
  modified_base 15: mod_base = um
  modified_base 16: mod_base = OTHER; note = 2' Fluoro-guanosine
  modified_base 17: mod_base = OTHER; note = 2'O-methyl-adenosine
  modified_base 18: mod_base = OTHER; note = 2'O-methyl-adenosine
  modified_base 19: mod_base = gm
  modified_base 20: mod_base = gm
  modified_base 21: mod_base = cm
  modified_base 22: mod_base = OTHER; note = 2'O-methyl-adenosine
  modified_base 23: mod_base = OTHER; note = 2'O-methyl-adenosine
  misc_feature 1^2: note = phosphorothioate linkage
  misc_feature 2^3: note = phosphorothioate linkage
  misc_feature 21^22: note = phosphorothioate linkage
  misc_feature 22^23: note = phosphorothioate linkage
aaaatccttgtggatgaaggcaa

SEQ ID NO: 763 - RNA, 23 nt, synthetic construct
  source 1..23: mol_type = other RNA
  misc_feature 1..23: note = Antisense: ETXS1034; corresponding to SEQ ID NO: 144
  modified_base 1: mod_base = OTHER; note = 2'O-methyl-adenosine
  modified_base 2: mod_base = OTHER; note = 2'Fluoro-adenosine
  modified_base 3: mod_base = OTHER; note = 2'O-methyl-adenosine
  modified_base 4: mod_base = OTHER; note = 2'O-methyl-adenosine
  modified_base 5: mod_base = um
  modified_base 6: mod_base = OTHER; note = 2' Fluoro-cytidine
  modified_base 7: mod_base = cm
  modified_base 8: mod_base = OTHER; note = 2' Fluoro-uridine
  modified_base 9: mod_base = um
  modified_base 10: mod_base = gm
  modified_base 11: mod_base = um
  modified_base 12: mod_base = gm
  modified_base 13: mod_base = gm
  modified_base 14: mod_base = OTHER; note = 2'Fluoro-adenosine
  modified_base 15: mod_base = um
  modified_base 16: mod_base = OTHER; note = 2' Fluoro-guanosine
  modified_base 17: mod_base = OTHER; note = 2'O-methyl-adenosine
  modified_base 18: mod_base = OTHER; note = 2'O-methyl-adenosine
  modified_base 19: mod_base = gm
  modified_base 20: mod_base = gm
  modified_base 21: mod_base = cm
  modified_base 22: mod_base = OTHER; note = 2'O-methyl-adenosine
  modified_base 23: mod_base = OTHER; note = 2'O-methyl-adenosine
  misc_feature 1^2: note = phosphorothioate linkage
  misc_feature 2^3: note = phosphorothioate linkage
  misc_feature 21^22: note = phosphorothioate linkage
  misc_feature 22^23: note = phosphorothioate linkage
aaaatccttgtggatgaaggcaa

SEQ ID NO: 764 - RNA, 23 nt, synthetic construct
  source 1..23: mol_type = other RNA
  misc_feature 1..23: note = Antisense: ETXS1036; corresponding to SEQ ID NO: 145
  modified_base 1: mod_base = cm
  modified_base 2: mod_base = OTHER; note = 2'Fluoro-adenosine
  modified_base 3: mod_base = um
  modified_base 4: mod_base = OTHER; note = 2' Fluoro-guanosine
  modified_base 5: mod_base = gm
  modified_base 6: mod_base = OTHER; note = 2' Fluoro-uridine
  modified_base 7: mod_base = gm
  modified_base 8: mod_base = gm
  modified_base 9: mod_base = cm
  modified_base 10: mod_base = OTHER; note = 2'O-methyl-adenosine
  modified_base 11: mod_base = um
  modified_base 12: mod_base = um
  modified_base 13: mod_base = um
  modified_base 14: mod_base = OTHER; note = 2' Fluoro-cytidine
  modified_base 15: mod_base = cm
  modified_base 16: mod_base = OTHER; note = 2' Fluoro-uridine
  modified_base 17: mod_base = um
  modified_base 18: mod_base = gm
  modified_base 19: mod_base = gm
  modified_base 20: mod_base = um
  modified_base 21: mod_base = OTHER; note = 2'O-methyl-adenosine
  modified_base 22: mod_base = gm
  modified_base 23: mod_base = gm
  misc_feature 1^2: note = phosphorothioate linkage
  misc_feature 2^3: note = phosphorothioate linkage
  misc_feature 21^22: note = phosphorothioate linkage
  misc_feature 22^23: note = phosphorothioate linkage
catggtggcatttccttggtagg

SEQ ID NO: 765 - RNA, 23 nt, synthetic construct
  source 1..23: mol_type = other RNA
  misc_feature 1..23: note = Antisense: ETXS1038; corresponding to SEQ ID NO: 145
  modified_base 1: mod_base = cm
  modified_base 2: mod_base = OTHER; note = 2'Fluoro-adenosine
  modified_base 3: mod_base = um
  modified_base 4: mod_base = gm
  modified_base 5: mod_base = gm
  modified_base 6: mod_base = OTHER; note = 2' Fluoro-uridine
  modified_base 7: mod_base = gm
  modified_base 8: mod_base = OTHER; note = 2' Fluoro-guanosine
  modified_base 9: mod_base = cm
  modified_base 10: mod_base = OTHER; note = 2'O-methyl-adenosine
  modified_base 11: mod_base = um
  modified_base 12: mod_base = um
  modified_base 13: mod_base = um
  modified_base 14: mod_base = OTHER; note = 2' Fluoro-cytidine
  modified_base 15: mod_base = cm
  modified_base 16: mod_base = OTHER; note = 2' Fluoro-uridine
  modified_base 17: mod_base = um
  modified_base 18: mod_base = gm
  modified_base 19: mod_base = gm
  modified_base 20: mod_base = um
  modified_base 21: mod_base = OTHER; note = 2'O-methyl-adenosine
  modified_base 22: mod_base = gm
  modified_base 23: mod_base = gm
  misc_feature 1^2: note = phosphorothioate linkage
  misc_feature 2^3: note = phosphorothioate linkage
  misc_feature 21^22: note = phosphorothioate linkage
  misc_feature 22^23: note = phosphorothioate linkage
catggtggcatttccttggtagg

SEQ ID NO: 766 - RNA, 23 nt, synthetic construct
  source 1..23: mol_type = other RNA
  misc_feature 1..23: note = Antisense: ETXS1040; corresponding to SEQ ID NO: 148
  modified_base 1: mod_base = um
  modified_base 2: mod_base = OTHER; note = 2' Fluoro-cytidine
  modified_base 3: mod_base = gm
  modified_base 4: mod_base = OTHER; note = 2' Fluoro-uridine
  modified_base 5: mod_base = gm
  modified_base 6: mod_base = OTHER; note = 2' Fluoro-cytidine
  modified_base 7: mod_base = cm
  modified_base 8: mod_base = um
  modified_base 9: mod_base = cm
  modified_base 10: mod_base = OTHER; note = 2'O-methyl-adenosine
  modified_base 11: mod_base = um
  modified_base 12: mod_base = gm
  modified_base 13: mod_base = gm
  modified_base 14: mod_base = OTHER; note = 2'Fluoro-adenosine
  modified_base 15: mod_base = gm
  modified_base 16: mod_base = OTHER; note = 2'Fluoro-adenosine
  modified_base 17: mod_base = um
  modified_base 18: mod_base = cm
  modified_base 19: mod_base = um
  modified_base 20: mod_base = um
  modified_base 21: mod_base = um
  modified_base 22: mod_base = cm
  modified_base 23: mod_base = gm
  misc_feature 1^2: note = phosphorothioate linkage
  misc_feature 2^3: note = phosphorothioate linkage
  misc_feature 21^22: note = phosphorothioate linkage
  misc_feature 22^23: note = phosphorothioate linkage
tcgtgcctcatggagatctttcg

SEQ ID NO: 767 - RNA, 23 nt, synthetic construct
  source 1..23: mol_type = other RNA
  misc_feature 1..23: note = Antisense: ETXS1042; corresponding to SEQ ID NO: 148
  modified_base 1: mod_base = um
  modified_base 2: mod_base = OTHER; note = 2' Fluoro-cytidine
  modified_base 3: mod_base = gm
  modified_base 4: mod_base = um
  modified_base 5: mod_base = gm
  modified_base 6: mod_base = OTHER; note = 2' Fluoro-cytidine
  modified_base 7: mod_base = cm
  modified_base 8: mod_base = OTHER; note = 2' Fluoro-uridine
  modified_base 9: mod_base = cm
  modified_base 10: mod_base = OTHER; note = 2'O-methyl-adenosine
  modified_base 11: mod_base = um
  modified_base 12: mod_base = gm
  modified_base 13: mod_base = gm
  modified_base 14: mod_base = OTHER; note = 2'Fluoro-adenosine
  modified_base 15: mod_base = gm
  modified_base 16: mod_base = OTHER; note = 2'Fluoro-adenosine
  modified_base 17: mod_base = um
  modified_base 18: mod_base = cm
  modified_base 19: mod_base = um
  modified_base 20: mod_base = um
  modified_base 21: mod_base = um
  modified_base 22: mod_base = cm
  modified_base 23: mod_base = gm
  misc_feature 1^2: note = phosphorothioate linkage
  misc_feature 2^3: note = phosphorothioate linkage
  misc_feature 21^22: note = phosphorothioate linkage
  misc_feature 22^23: note = phosphorothioate linkage
tcgtgcctcatggagatctttcg

SEQ ID NO: 768 - RNA, 23 nt, synthetic construct
  source 1..23: mol_type = other RNA
  misc_feature 1..23: note = Antisense: ETXS1044; corresponding to SEQ ID NO: 165
  modified_base 1: mod_base = OTHER; note = 2'O-methyl-adenosine
  modified_base 2: mod_base = OTHER; note = 2'Fluoro-adenosine
  modified_base 3: mod_base = OTHER; note = 2'O-methyl-adenosine
  modified_base 4: mod_base = OTHER; note = 2' Fluoro-uridine
  modified_base 5: mod_base = um
  modified_base 6: mod_base = OTHER; note = 2' Fluoro-cytidine
  modified_base 7: mod_base = um
  modified_base 8: mod_base = um
  modified_base 9: mod_base = gm
  modified_base 10: mod_base = um
  modified_base 11: mod_base = cm
  modified_base 12: mod_base = OTHER; note = 2'O-methyl-adenosine
  modified_base 13: mod_base = OTHER; note = 2'O-methyl-adenosine
  modified_base 14: mod_base = OTHER; note = 2'Fluoro-adenosine
  modified_base 15: mod_base = gm
  modified_base 16: mod_base = OTHER; note = 2' Fluoro-guanosine
  modified_base 17: mod_base = um
  modified_base 18: mod_base = gm
  modified_base 19: mod_base = gm
  modified_base 20: mod_base = OTHER; note = 2'O-methyl-adenosine
  modified_base 21: mod_base = gm
  modified_base 22: mod_base = gm
  modified_base 23: mod_base = cm
  misc_feature 1^2: note = phosphorothioate linkage
  misc_feature 2^3: note = phosphorothioate linkage
  misc_feature 21^22: note = phosphorothioate linkage
  misc_feature 22^23: note = phosphorothioate linkage
aaattcttgtcaaaggtggaggc

SEQ ID NO: 769 - RNA, 23 nt, synthetic construct
  source 1..23: mol_type = other RNA
  misc_feature 1..23: note = Antisense: ETXS1046; corresponding to SEQ ID NO: 165
  modified_base 1: mod_base = OTHER; note = 2'O-methyl-adenosine
  modified_base 2: mod_base = OTHER; note = 2'Fluoro-adenosine
  modified_base 3: mod_base = OTHER; note = 2'O-methyl-adenosine
  modified_base 4: mod_base = um
  modified_base 5: mod_base = um
  modified_base 6: mod_base = OTHER; note = 2' Fluoro-cytidine
  modified_base 7: mod_base = um
  modified_base 8: mod_base = OTHER; note = 2' Fluoro-uridine
  modified_base 9: mod_base = gm
  modified_base 10: mod_base = um
  modified_base 11: mod_base = cm
  modified_base 12: mod_base = OTHER; note = 2'O-methyl-adenosine
  modified_base 13: mod_base = OTHER; note = 2'O-methyl-adenosine
  modified_base 14: mod_base = OTHER; note = 2'Fluoro-adenosine
  modified_base 15: mod_base = gm
  modified_base 16: mod_base = OTHER; note = 2' Fluoro-guanosine
  modified_base 17: mod_base = um
  modified_base 18: mod_base = gm
  modified_base 19: mod_base = gm
  modified_base 20: mod_base = OTHER; note = 2'O-methyl-adenosine
  modified_base 21: mod_base = gm
  modified_base 22: mod_base = gm
  modified_base 23: mod_base = cm
  misc_feature 1^2: note = phosphorothioate linkage
  misc_feature 2^3: note = phosphorothioate linkage
  misc_feature 21^22: note = phosphorothioate linkage
  misc_feature 22^23: note = phosphorothioate linkage
aaattcttgtcaaaggtggaggc

SEQ ID NO: 770 - RNA, 23 nt, synthetic construct
  source 1..23: mol_type = other RNA
  misc_feature 1..23: note = Antisense: ETXS1048; corresponding to SEQ ID NO: 202
  modified_base 1: mod_base = um
  modified_base 2: mod_base = OTHER; note = 2' Fluoro-guanosine
  modified_base 3: mod_base = um
  modified_base 4: mod_base = OTHER; note = 2' Fluoro-guanosine
  modified_base 5: mod_base = gm
  modified_base 6: mod_base = OTHER; note = 2'Fluoro-adenosine
  modified_base 7: mod_base = um
  modified_base 8: mod_base = gm
  modified_base 9: mod_base = OTHER; note = 2'O-methyl-adenosine
  modified_base 10: mod_base = OTHER; note = 2'O-methyl-adenosine
  modified_base 11: mod_base = gm
  modified_base 12: mod_base = gm
  modified_base 13: mod_base = cm
  modified_base 14: mod_base = OTHER; note = 2'Fluoro-adenosine
  modified_base 15: mod_base = OTHER; note = 2'O-methyl-adenosine
  modified_base 16: mod_base = OTHER; note = 2'Fluoro-adenosine
  modified_base 17: mod_base = OTHER; note = 2'O-methyl-adenosine
  modified_base 18: mod_base = cm
  modified_base 19: mod_base = um
  modified_base 20: mod_base = cm
  modified_base 21: mod_base = cm
  modified_base 22: mod_base = cm
  modified_base 23: mod_base = cm
  misc_feature 1^2: note = phosphorothioate linkage
  misc_feature 2^3: note = phosphorothioate linkage
  misc_feature 21^22: note = phosphorothioate linkage
  misc_feature 22^23: note = phosphorothioate linkage
tgtggatgaaggcaaaactcccc

SEQ ID NO: 771 - RNA, 23 nt, synthetic construct
  source 1..23: mol_type = other RNA
  misc_feature 1..23: note = Antisense: ETXS1050; corresponding to SEQ ID NO: 202
  modified_base 1: mod_base = um
  modified_base 2: mod_base = OTHER; note = 2' Fluoro-guanosine
  modified_base 3: mod_base = um
  modified_base 4: mod_base = gm
  modified_base 5: mod_base = gm
  modified_base 6: mod_base = OTHER; note = 2'Fluoro-adenosine
  modified_base 7: mod_base = um
  modified_base 8: mod_base = OTHER; note = 2' Fluoro-guanosine
  modified_base 9: mod_base = OTHER; note = 2'O-methyl-adenosine
  modified_base 10: mod_base = OTHER; note = 2'O-methyl-adenosine
  modified_base 11: mod_base = gm
  modified_base 12: mod_base = gm
  modified_base 13: mod_base = cm
  modified_base 14: mod_base = OTHER; note = 2'Fluoro-adenosine
  modified_base 15: mod_base = OTHER; note = 2'O-methyl-adenosine
  modified_base 16: mod_base = OTHER; note = 2'Fluoro-adenosine
  modified_base 17: mod_base = OTHER; note = 2'O-methyl-adenosine
  modified_base 18: mod_base = cm
  modified_base 19: mod_base = um
  modified_base 20: mod_base = cm
  modified_base 21: mod_base = cm
  modified_base 22: mod_base = cm
  modified_base 23: mod_base = cm
  misc_feature 1^2: note = phosphorothioate linkage
  misc_feature 2^3: note = phosphorothioate linkage
  misc_feature 21^22: note = phosphorothioate linkage
  misc_feature 22^23: note = phosphorothioate linkage
tgtggatgaaggcaaaactcccc

SEQ ID NO: 772 - RNA, 21 nt, synthetic construct
  source 1..21: mol_type = other RNA
  misc_feature 1..21: note = Description: ZPI siRNA sense strand: ETXS1031; corresponding to SEQ ID NO: 264
  modified_base 1: mod_base = gm
  modified_base 2: mod_base = cm
  modified_base 3: mod_base = cm
  modified_base 4: mod_base = um
  modified_base 5: mod_base = um
  modified_base 6: mod_base = cm
  modified_base 7: mod_base = OTHER; note = Af
  modified_base 8: mod_base = um
  modified_base 9: mod_base = OTHER; note = 2' Fluoro-cytidine
  modified_base 10: mod_base = OTHER; note = 2' Fluoro-cytidine
  modified_base 11: mod_base = OTHER; note = Af
  modified_base 12: mod_base = OTHER; note = 2' Fluoro-cytidine
  modified_base 13: mod_base = OTHER; note = 2'O-methyl-adenosine
  modified_base 14: mod_base = OTHER; note = 2'O-methyl-adenosine
  modified_base 15: mod_base = gm
  modified_base 16: mod_base = gm
  modified_base 17: mod_base = OTHER; note = 2'O-methyl-adenosine
  modified_base 18: mod_base = um
  modified_base 19: mod_base = um
  modified_base 20: mod_base = um
  modified_base 21: mod_base = OTHER; note = um
  misc_feature <1: note = two abasic inverted nucleoside overhang
  misc_feature 1^2: note = phosphorothioate linkage
  misc_feature 2^3: note = phosphorothioate linkage
gccttcatccacaaggatttt

SEQ ID NO: 773 - RNA, 21 nt, synthetic construct
  source 1..21: mol_type = other RNA
  misc_feature 1..21: note = Description: ZPI siRNA sense strand: ETXS1033; corresponding to SEQ ID NO: 264
  modified_base 1: mod_base = gm
  modified_base 2: mod_base = cm
  modified_base 3: mod_base = cm
  modified_base 4: mod_base = um
  modified_base 5: mod_base = um
  modified_base 6: mod_base = cm
  modified_base 7: mod_base = OTHER; note = 2'O-methyl-adenosine
  modified_base 8: mod_base = um
  modified_base 9: mod_base = OTHER; note = 2' Fluoro-cytidine
  modified_base 10: mod_base = OTHER; note = 2' Fluoro-cytidine
  modified_base 11: mod_base = OTHER; note = Af
  modified_base 12: mod_base = cm
  modified_base 13: mod_base = OTHER; note = 2'O-methyl-adenosine
  modified_base 14: mod_base = OTHER; note = 2'O-methyl-adenosine
  modified_base 15: mod_base = gm
  modified_base 16: mod_base = gm
  modified_base 17: mod_base = OTHER; note = 2'O-methyl-adenosine
  modified_base 18: mod_base = um
  modified_base 19: mod_base = um
  modified_base 20: mod_base = um
  modified_base 21: mod_base = um
  misc_feature <1: note = two abasic inverted nucleoside overhang
  misc_feature 1^2: note = phosphorothioate linkage
  misc_feature 2^3: note = phosphorothioate linkage
gccttcatccacaaggatttt

SEQ ID NO: 774 - RNA, 21 nt, synthetic construct
  source 1..21: mol_type = other RNA
  misc_feature 1..21: note = Description: ZPI siRNA sense strand: ETXS1035; corresponding to SEQ ID NO: 265
  modified_base 1: mod_base = um
  modified_base 2: mod_base = OTHER; note = 2'O-methyl-adenosine
  modified_base 3: mod_base = cm
  modified_base 4: mod_base = cm
  modified_base 5: mod_base = OTHER; note = 2'O-methyl-adenosine
  modified_base 6: mod_base = OTHER; note = 2'O-methyl-adenosine
  modified_base 7: mod_base = OTHER; note = 2' Fluoro-guanosine
  modified_base 8: mod_base = gm
  modified_base 9: mod_base = OTHER; note = Af
  modified_base 10: mod_base = OTHER; note = Af
  modified_base 11: mod_base = OTHER; note = Af
  modified_base 12: mod_base = OTHER; note = 2' Fluoro-uridine
  modified_base 13: mod_base = gm
  modified_base 14: mod_base = cm
  modified_base 15: mod_base = cm
  modified_base 16: mod_base = OTHER; note = 2'O-methyl-adenosine
  modified_base 17: mod_base = cm
  modified_base 18: mod_base = cm
  modified_base 19: mod_base = OTHER; note = 2'O-methyl-adenosine
  modified_base 20: mod_base = um
  modified_base 21: mod_base = gm
  misc_feature <1: note = two abasic inverted nucleoside overhang
  misc_feature 1^2: note = phosphorothioate linkage
  misc_feature 2^3: note = phosphorothioate linkage
taccaaggaaatgccaccatg

SEQ ID NO: 775 - RNA, 21 nt, synthetic construct
  source 1..21: mol_type = other RNA
  misc_feature 1..21: note = Description: ZPI siRNA sense strand: ETXS1037; corresponding to SEQ ID NO: 265
  modified_base 1: mod_base = um
  modified_base 2: mod_base = OTHER; note = 2'O-methyl-adenosine
  modified_base 3: mod_base = cm
  modified_base 4: mod_base = cm
  modified_base 5: mod_base = OTHER; note = 2'O-methyl-adenosine
  modified_base 6: mod_base = OTHER; note = 2'O-methyl-adenosine
  modified_base 7: mod_base = gm
  modified_base 8: mod_base = gm
  modified_base 9: mod_base = OTHER; note = Af
  modified_base 10: mod_base = OTHER; note = Af
  modified_base 11: mod_base = OTHER; note = Af
  modified_base 12: mod_base = um
  modified_base 13: mod_base = gm
  modified_base 14: mod_base = cm
  modified_base 15: mod_base = cm
  modified_base 16: mod_base = OTHER; note = 2'O-methyl-adenosine
  modified_base 17: mod_base = cm
  modified_base 18: mod_base = cm
  modified_base 19: mod_base = OTHER; note = 2'O-methyl-adenosine
  modified_base 20: mod_base = um
  modified_base 21: mod_base = gm
  misc_feature <1: note = two abasic inverted nucleoside overhang
  misc_feature 1^2: note = phosphorothioate linkage
  misc_feature 2^3: note = phosphorothioate linkage
taccaaggaaatgccaccatg

SEQ ID NO: 776 - RNA, 21 nt, synthetic construct
  source 1..21: mol_type = other RNA
  misc_feature 1..21: note = Description: ZPI siRNA sense strand: ETXS1039; corresponding to SEQ ID NO: 268
  modified_base 1: mod_base = OTHER; note = 2'O-methyl-adenosine
  modified_base 2: mod_base = OTHER; note = 2'O-methyl-adenosine
  modified_base 3: mod_base = OTHER; note = 2'O-methyl-adenosine
  modified_base 4: mod_base = gm
  modified_base 5: mod_base = OTHER; note = 2'O-methyl-adenosine
  modified_base 6: mod_base = um
  modified_base 7: mod_base = OTHER; note = 2' Fluoro-cytidine
  modified_base 8: mod_base = um
  modified_base 9: mod_base = OTHER; note = 2' Fluoro-cytidine
  modified_base 10: mod_base = OTHER; note = 2' Fluoro-cytidine
  modified_base 11: mod_base = OTHER; note = Af
  modified_base 12: mod_base = OTHER; note = 2' Fluoro-uridine
  modified_base 13: mod_base = gm
  modified_base 14: mod_base = OTHER; note = 2'O-methyl-adenosine
  modified_base 15: mod_base = gm
  modified_base 16: mod_base = gm
  modified_base 17: mod_base = cm
  modified_base 18: mod_base = OTHER; note = 2'O-methyl-adenosine
  modified_base 19: mod_base = cm
  modified_base 20: mod_base = gm
  modified_base 21: mod_base = OTHER; note = 2'O-methyl-adenosine
  misc_feature <1: note = two abasic inverted nucleoside overhang
  misc_feature 1^2: note = phosphorothioate linkage
  misc_feature 2^3: note = phosphorothioate linkage
aaagatctccatgaggcacga

SEQ ID NO: 777 - RNA, 21 nt, synthetic construct
  source 1..21: mol_type = other RNA
  misc_feature 1..21: note = Description: ZPI siRNA sense strand: ETXS1041; corresponding to SEQ ID NO: 268
  modified_base 1: mod_base = OTHER; note = 2'O-methyl-adenosine
  modified_base 2: mod_base = OTHER; note = 2'O-methyl-adenosine
  modified_base 3: mod_base = OTHER; note = 2'O-methyl-adenosine
  modified_base 4: mod_base = gm
  modified_base 5: mod_base = OTHER; note = 2'O-methyl-adenosine
  modified_base 6: mod_base = um
  modified_base 7: mod_base = cm
  modified_base 8: mod_base = um
  modified_base 9: mod_base = OTHER; note = 2' Fluoro-cytidine
  modified_base 10: mod_base = OTHER; note = 2' Fluoro-cytidine
  modified_base 11: mod_base = OTHER; note = Af
  modified_base 12: mod_base = um
  modified_base 13: mod_base = gm
  modified_base 14: mod_base = OTHER; note = 2'O-methyl-adenosine
  modified_base 15: mod_base = gm
  modified_base 16: mod_base = gm
  modified_base 17: mod_base = cm
  modified_base 18: mod_base = OTHER; note = 2'O-methyl-adenosine
  modified_base 19: mod_base = cm
  modified_base 20: mod_base = gm
  modified_base 21: mod_base = OTHER; note = 2'O-methyl-adenosine
  misc_feature <1: note = two abasic inverted nucleoside overhang
  misc_feature 1^2: note = phosphorothioate linkage
  misc_feature 2^3: note = phosphorothioate linkage
aaagatctccatgaggcacga

SEQ ID NO: 778 - RNA, 21 nt, synthetic construct
  source 1..21: mol_type = other RNA
  misc_feature 1..21: note = Description: ZPI siRNA sense strand: ETXS1043; corresponding to SEQ ID NO: 285
  modified_base 1: mod_base = cm
  modified_base 2: mod_base = um
  modified_base 3: mod_base = cm
  modified_base 4: mod_base = cm
  modified_base 5: mod_base = OTHER; note = 2'O-methyl-adenosine
  modified_base 6: mod_base = cm
  modified_base 7: mod_base = OTHER; note = 2' Fluoro-cytidine
  modified_base 8: mod_base = um
  modified_base 9: mod_base = OTHER; note = 2' Fluoro-uridine
  modified_base 10: mod_base = OTHER; note = 2' Fluoro-uridine
  modified_base 11: mod_base = OTHER; note = 2' Fluoro-guanosine
  modified_base 12: mod_base = OTHER; note = Af
  modified_base 13: mod_base = cm
  modified_base 14: mod_base = OTHER; note = 2'O-methyl-adenosine
  modified_base 15: mod_base = OTHER; note = 2'O-methyl-adenosine
  modified_base 16: mod_base = gm
  modified_base 17: mod_base = OTHER; note = 2'O-methyl-adenosine
  modified_base 18: mod_base = OTHER; note = 2'O-methyl-adenosine
  modified_base 19: mod_base = um
  modified_base 20: mod_base = um
  modified_base 21: mod_base = um
  misc_feature <1: note = two abasic inverted nucleoside overhang
  misc_feature 1^2: note = phosphorothioate linkage
  misc_feature 2^3: note = phosphorothioate linkage
ctccacctttgacaagaattt

SEQ ID NO: 779 - RNA, 21 nt, synthetic construct
  source 1..21: mol_type = other RNA
  misc_feature 1..21: note = Description: ZPI siRNA sense strand: ETXS1045; corresponding to SEQ ID NO: 285
  modified_base 1: mod_base = cm
  modified_base 2: mod_base = um
  modified_base 3: mod_base = cm
  modified_base 4: mod_base = cm
  modified_base 5: mod_base = OTHER; note = 2'O-methyl-adenosine
  modified_base 6: mod_base = cm
  modified_base 7: mod_base = cm
  modified_base 8: mod_base = um
  modified_base 9: mod_base = OTHER; note = 2' Fluoro-uridine
  modified_base 10: mod_base = OTHER; note = 2' Fluoro-uridine
  modified_base 11: mod_base = OTHER; note = 2' Fluoro-guanosine
  modified_base 12: mod_base = OTHER; note = 2'O-methyl-adenosine
  modified_base 13: mod_base = cm
  modified_base 14: mod_base = OTHER; note = 2'O-methyl-adenosine
  modified_base 15: mod_base = OTHER; note = 2'O-methyl-adenosine
  modified_base 16: mod_base = gm
  modified_base 17: mod_base = OTHER; note = 2'O-methyl-adenosine
  modified_base 18: mod_base = OTHER; note = 2'O-methyl-adenosine
  modified_base 19: mod_base = um
  modified_base 20: mod_base = um
  modified_base 21: mod_base = um
  misc_feature <1: note = two abasic inverted nucleoside overhang
  misc_feature 1^2: note = phosphorothioate linkage
  misc_feature 2^3: note = phosphorothioate linkage
ctccacctttgacaagaattt

SEQ ID NO: 780 - RNA, 21 nt, synthetic construct
  source 1..21: mol_type = other RNA
  misc_feature 1..21: note = Description: ZPI siRNA sense strand: ETXS1047; corresponding to SEQ ID NO: 322
  modified_base 1: mod_base = gm
  modified_base 2: mod_base = gm
  modified_base 3: mod_base = OTHER; note = 2'O-methyl-adenosine
  modified_base 4: mod_base = gm
  modified_base 5: mod_base = um
  modified_base 6: mod_base = um
  modified_base 7: mod_base = OTHER; note = 2' Fluoro-uridine
  modified_base 8: mod_base = um
  modified_base 9: mod_base = OTHER; note = 2' Fluoro-guanosine
  modified_base 10: mod_base = OTHER; note = 2' Fluoro-cytidine
  modified_base 11: mod_base = OTHER; note = 2' Fluoro-cytidine
  modified_base 12: mod_base = OTHER; note = 2' Fluoro-uridine
  modified_base 13: mod_base = um
  modified_base 14: mod_base = cm
  modified_base 15: mod_base = OTHER; note = 2'O-methyl-adenosine
  modified_base 16: mod_base = um
  modified_base 17: mod_base = cm
  modified_base 18: mod_base = cm
  modified_base 19: mod_base = OTHER; note = 2'O-methyl-adenosine
  modified_base 20: mod_base = cm
  modified_base 21: mod_base = OTHER; note = 2'O-methyl-adenosine
  misc_feature <1: note = two abasic inverted nucleoside overhang
  misc_feature 1^2: note = phosphorothioate linkage
  misc_feature 2^3: note = phosphorothioate linkage
ggagttttgccttcatccaca

SEQ ID NO: 781 - RNA, 21 nt, synthetic construct
  source 1..21: mol_type = other RNA
  misc_feature 1..21: note = Description: ZPI siRNA sense strand: ETXS1049; corresponding to SEQ ID NO: 322
  modified_base 1: mod_base = gm
  modified_base 2: mod_base = gm
  modified_base 3: mod_base = OTHER; note = 2'O-methyl-adenosine
  modified_base 4: mod_base = gm
  modified_base 5: mod_base = um
  modified_base 6: mod_base = um
  modified_base 7: mod_base = um
  modified_base 8: mod_base = um
  modified_base 9: mod_base = OTHER; note = 2' Fluoro-guanosine
  modified_base 10: mod_base = OTHER; note = 2' Fluoro-cytidine
  modified_base 11: mod_base = OTHER; note = 2' Fluoro-cytidine
  modified_base 12: mod_base = um
  modified_base 13: mod_base = um
  modified_base 14: mod_base = cm
  modified_base 15: mod_base = OTHER; note = 2'O-methyl-adenosine
  modified_base 16: mod_base = um
  modified_base 17: mod_base = cm
  modified_base 18: mod_base = cm
  modified_base 19: mod_base = OTHER; note = 2'O-methyl-adenosine
  modified_base 20: mod_base = cm
  modified_base 21: mod_base = OTHER; note = 2'O-methyl-adenosine
  misc_feature <1: note = two abasic inverted nucleoside overhang
  misc_feature 1^2: note = phosphorothioate linkage
  misc_feature 2^3: note = phosphorothioate linkage
ggagttttgccttcatccaca

SEQ ID NO: 782 - RNA, 23 nt, synthetic construct
  source 1..23: mol_type = other RNA
  misc_feature 1..23: note = Antisense: ETXS1051; corresponding to SEQ ID NO: 144
  modified_base 1: mod_base = OTHER; note = 2'O-methyl-adenosine
  modified_base 2: mod_base = OTHER; note = 2'Fluoro-adenosine
  modified_base 3: mod_base = OTHER; note = 2'O-methyl-adenosine
  modified_base 4: mod_base = OTHER; note = 2'O-methyl-adenosine
  modified_base 5: mod_base = um
  modified_base 6: mod_base = OTHER; note = 2' Fluoro-cytidine
  modified_base 7: mod_base = cm
  modified_base 8: mod_base = um
  modified_base 9: mod_base = um
  modified_base 10: mod_base = gm
  modified_base 11: mod_base = um
  modified_base 12: mod_base = gm
  modified_base 13: mod_base = gm
  modified_base 14: mod_base = OTHER; note = 2'Fluoro-adenosine
  modified_base 15: mod_base = um
  modified_base 16: mod_base = OTHER; note = 2' Fluoro-guanosine
  modified_base 17: mod_base = OTHER; note = 2'O-methyl-adenosine
  modified_base 18: mod_base = OTHER; note = 2'Fluoro-adenosine
  modified_base 19: mod_base = gm
  modified_base 20: mod_base = gm
  modified_base 21: mod_base = cm
  modified_base 22: mod_base = OTHER; note = 2'O-methyl-adenosine
  modified_base 23: mod_base = OTHER; note = 2'O-methyl-adenosine
  misc_feature 1^2: note = phosphorothioate linkage
  misc_feature 2^3: note = phosphorothioate linkage
  misc_feature 21^22: note = phosphorothioate linkage
  misc_feature 22^23: note = phosphorothioate linkage
aaaatccttgtggatgaaggcaa

SEQ ID NO: 783 - RNA, 23 nt, synthetic construct
  source 1..23: mol_type = other RNA
  misc_feature 1..23: note = Antisense: ETXS1052; corresponding to SEQ ID NO: 145
  modified_base 1: mod_base = cm
  modified_base 2: mod_base = OTHER; note = 2'Fluoro-adenosine
  modified_base 3: mod_base = um
  modified_base 4: mod_base = gm
  modified_base 5: mod_base = gm
  modified_base 6: mod_base = OTHER; note = 2' Fluoro-uridine
  modified_base 7: mod_base = gm
  modified_base 8: mod_base = gm
  modified_base 9: mod_base = cm
  modified_base 10: mod_base = OTHER; note = 2'O-methyl-adenosine
  modified_base 11: mod_base = um
  modified_base 12: mod_base = um
  modified_base 13: mod_base = um
  modified_base 14: mod_base = OTHER; note = 2' Fluoro-cytidine
  modified_base 15: mod_base = cm
  modified_base 16: mod_base = OTHER; note = 2' Fluoro-uridine
  modified_base 17: mod_base = um
  modified_base 18: mod_base = OTHER; note = 2' Fluoro-guanosine
  modified_base 19: mod_base = gm
  modified_base 20: mod_base = um
  modified_base 21: mod_base = OTHER; note = 2'O-methyl-adenosine
  modified_base 22: mod_base = gm
  modified_base 23: mod_base = gm
  misc_feature 1^2: note = phosphorothioate linkage
  misc_feature 2^3: note = phosphorothioate linkage
  misc_feature 21^22: note = phosphorothioate linkage
  misc_feature 22^23: note = phosphorothioate linkage
catggtggcatttccttggtagg

SEQ ID NO: 784 - RNA, 23 nt, synthetic construct
  source 1..23: mol_type = other RNA
  misc_feature 1..23: note = Antisense: ETXS1053; corresponding to SEQ ID NO: 148
  modified_base 1: mod_base = um
  modified_base 2: mod_base = OTHER; note = 2' Fluoro-cytidine
  modified_base 3: mod_base = gm
  modified_base 4: mod_base = um
  modified_base 5: mod_base = gm
  modified_base 6: mod_base = OTHER; note = 2' Fluoro-cytidine
  modified_base 7: mod_base = cm
  modified_base 8: mod_base = um
  modified_base 9: mod_base = cm
  modified_base 10: mod_base = OTHER; note = 2'O-methyl-adenosine
  modified_base 11: mod_base = um
  modified_base 12: mod_base = gm
  modified_base 13: mod_base = gm
  modified_base 14: mod_base = OTHER; note = 2'Fluoro-adenosine
  modified_base 15: mod_base = gm
  modified_base 16: mod_base = OTHER; note = 2'Fluoro-adenosine
  modified_base 17: mod_base = um
  modified_base 18: mod_base = OTHER; note = 2' Fluoro-cytidine
  modified_base 19: mod_base = um
  modified_base 20: mod_base = um
  modified_base 21: mod_base = um
  modified_base 22: mod_base = cm
  modified_base 23: mod_base = gm
  misc_feature 1^2: note = phosphorothioate linkage
  misc_feature 2^3: note = phosphorothioate linkage
  misc_feature 21^22: note = phosphorothioate linkage
  misc_feature 22^23: note = phosphorothioate linkage
tcgtgcctcatggagatctttcg

SEQ ID NO: 785 - RNA, 23 nt, synthetic construct
  source 1..23: mol_type = other RNA
  misc_feature 1..23: note = Antisense: ETXS1054; corresponding to SEQ ID NO: 165
  modified_base 1: mod_base = OTHER; note = 2'O-methyl-adenosine
  modified_base 2: mod_base = OTHER; note = 2'Fluoro-adenosine
  modified_base 3: mod_base = OTHER; note = 2'O-methyl-adenosine
  modified_base 4: mod_base = um
  modified_base 5: mod_base = um
  modified_base 6: mod_base = OTHER; note = 2' Fluoro-cytidine
  modified_base 7: mod_base = um
  modified_base 8: mod_base = um
  modified_base 9: mod_base = gm
  modified_base 10: mod_base = um
  modified_base 11: mod_base = cm
  modified_base 12: mod_base = OTHER; note = 2'O-methyl-adenosine
  modified_base 13: mod_base = OTHER; note = 2'O-methyl-adenosine
  modified_base 14: mod_base = OTHER; note = 2'Fluoro-adenosine
  modified_base 15: mod_base = gm
  modified_base 16: mod_base = OTHER; note = 2' Fluoro-guanosine
  modified_base 17: mod_base = um
  modified_base 18: mod_base = OTHER; note = 2' Fluoro-guanosine
  modified_base 19: mod_base = gm
  modified_base 20: mod_base = OTHER; note = 2'O-methyl-adenosine
  modified_base 21: mod_base = gm
  modified_base 22: mod_base = gm
  modified_base 23: mod_base = cm
  misc_feature 1^2: note = phosphorothioate linkage
  misc_feature 2^3: note = phosphorothioate linkage
  misc_feature 21^22: note = phosphorothioate linkage
  misc_feature 22^23: note = phosphorothioate linkage
aaattcttgtcaaaggtggaggc

SEQ ID NO: 786 - RNA, 23 nt, synthetic construct
  source 1..23: mol_type = other RNA
  misc_feature 1..23: note = Antisense: ETXS1055; corresponding to SEQ ID NO: 202
  modified_base 1: mod_base = um
  modified_base 2: mod_base = OTHER; note = 2' Fluoro-guanosine
  modified_base 3: mod_base = um
  modified_base 4: mod_base = gm
  modified_base 5: mod_base = gm
  modified_base 6: mod_base = OTHER; note = 2'Fluoro-adenosine
  modified_base 7: mod_base = um
  modified_base 8: mod_base = gm
  modified_base 9: mod_base = OTHER; note = 2'O-methyl-adenosine
  modified_base 10: mod_base = OTHER; note = 2'O-methyl-adenosine
  modified_base 11: mod_base = gm
  modified_base 12: mod_base = gm
  modified_base 13: mod_base = cm
  modified_base 14: mod_base = OTHER; note = 2'Fluoro-adenosine
  modified_base 15: mod_base = OTHER; note = 2'O-methyl-adenosine
  modified_base 16: mod_base = OTHER; note = 2'Fluoro-adenosine
  modified_base 17: mod_base = OTHER; note = 2'O-methyl-adenosine
  modified_base 18: mod_base = OTHER; note = 2' Fluoro-cytidine
  modified_base 19: mod_base = um
  modified_base 20: mod_base = cm
  modified_base 21: mod_base = cm
  modified_base 22: mod_base = cm
  modified_base 23: mod_base = cm
  misc_feature 1^2: note = phosphorothioate linkage
  misc_feature 2^3: note = phosphorothioate linkage
  misc_feature 21^22: note = phosphorothioate linkage
  misc_feature 22^23: note = phosphorothioate linkage
tgtggatgaaggcaaaactcccc

SEQ ID NO: 787 - RNA, 23 nt, synthetic construct
  source 1..23: mol_type = other RNA
  misc_feature 1..23: note = Description: ZPI siRNA antisense strand (unmodified)
aaagtccttgtggatgaaggcaa

SEQ ID NO: 788 - RNA, 23 nt, synthetic construct
  source 1..23: mol_type = other RNA
  misc_feature 1..23: note = Description: ZPI siRNA antisense strand (unmodified)
aacttcttgtcaaaggtggaggc

SEQ ID NO: 789 - RNA, 23 nt, synthetic construct
  source 1..23: mol_type = other RNA
  misc_feature 1..23: note = Description: ZPI siRNA antisense strand (unmodified)
tgtggatgaaggcaaagctaccc

SEQ ID NO: 790 - DNA, 21 bp, synthetic construct
  misc_feature 1..21: note = Description of sequence: Description: ZPI siRNA antisense strand (unmodified)
  source 1..21: mol_type = other DNA
  modified_base 4: mod_base = OTHER; note = u
  modified_base 11: mod_base = OTHER; note = u
  modified_base 12: mod_base = OTHER; note = u
acgtgacacgttcggagaatt

SEQ ID NO: 791 - RNA, 21 nt, synthetic construct
  source 1..21: mol_type = other RNA
  misc_feature 1..21: note = Description: ZPI siRNA sense strand (unmodified)
gccttcatccacaaggacttt

SEQ ID NO: 792 - RNA, 21 nt, synthetic construct
  source 1..21: mol_type = other RNA
  misc_feature 1..21: note = Description: ZPI siRNA sense strand (unmodified)
ctccacctttgacaagaagtt

SEQ ID NO: 793 - RNA, 21 nt, synthetic construct
  source 1..21: mol_type = other RNA
  misc_feature 1..21: note = Description: ZPI siRNA sense strand (unmodified)
gtagctttgccttcatccaca

SEQ ID NO: 794 - DNA, 21 bp, synthetic construct
  misc_feature 1..21: note = Description of sequence: Description: ZPI siRNA sense strand (unmodified)
  source 1..21: mol_type = other DNA
  modified_base 1: mod_base = OTHER; note = u
  modified_base 2: mod_base = OTHER; note = u
  modified_base 4: mod_base = OTHER; note = u
  modified_base 12: mod_base = OTHER; note = u
  modified_base 14: mod_base = OTHER; note = u
  modified_base 19: mod_base = OTHER; note = u
ttctccgaacgtgtcacgttt

SEQ ID NO: 795 - RNA, 23 nt, synthetic construct
  source 1..23: mol_type = other RNA
  misc_feature 1..23: note = Antisense: ETXS2128; corresponding to SEQ ID NO: 787
  modified_base 1: mod_base = OTHER; note = 2'O-methyl-adenosine
  modified_base 2: mod_base = OTHER; note = 2'Fluoro-adenosine
  modified_base 3: mod_base = OTHER; note = 2'O-methyl-adenosine
  modified_base 4: mod_base = gm
  modified_base 5: mod_base = um
  modified_base 6: mod_base = OTHER; note = 2' Fluoro-cytidine
  modified_base 7: mod_base = cm
  modified_base 8: mod_base = OTHER; note = 2' Fluoro-uridine
  modified_base 9: mod_base = OTHER; note = 2' Fluoro-uridine
  modified_base 10: mod_base = gm
  modified_base 11: mod_base = um
  modified_base 12: mod_base = gm
  modified_base 13: mod_base = gm
  modified_base 14: mod_base = OTHER; note = 2'Fluoro-adenosine
  modified_base 15: mod_base = um
  modified_base 16: mod_base = OTHER; note = 2' Fluoro-guanosine
  modified_base 17: mod_base = OTHER; note = 2'O-methyl-adenosine
  modified_base 18: mod_base = OTHER; note = 2'O-methyl-adenosine
  modified_base 19: mod_base = gm
  modified_base 20: mod_base = gm
  modified_base 21: mod_base = cm
  modified_base 22: mod_base = OTHER; note = 2'O-methyl-adenosine
  modified_base 23: mod_base = OTHER; note = 2'O-methyl-adenosine
  misc_feature 1^2: note = phosphorothioate linkage
  misc_feature 2^3: note = phosphorothioate linkage
  misc_feature 21^22: note = phosphorothioate linkage
  misc_feature 22^23: note = phosphorothioate linkage
aaagtccttgtggatgaaggcaa

SEQ ID NO: 796 - RNA, 23 nt, synthetic construct
  source 1..23: mol_type = other RNA
  misc_feature 1..23: note = Antisense: ETXS2144; corresponding to SEQ ID NO: 788
  modified_base 1: mod_base = OTHER; note = 2'O-methyl-adenosine
  modified_base 2: mod_base = OTHER; note = 2'Fluoro-adenosine
  modified_base 3: mod_base = cm
  modified_base 4: mod_base = um
  modified_base 5: mod_base = um
  modified_base 6: mod_base = OTHER; note = 2' Fluoro-cytidine
  modified_base 7: mod_base = um
  modified_base 8: mod_base = OTHER; note = 2' Fluoro-uridine
  modified_base 9: mod_base = OTHER; note = 2' Fluoro-guanosine
  modified_base 10: mod_base = um
  modified_base 11: mod_base = cm
  modified_base 12: mod_base = OTHER; note = 2'O-methyl-adenosine
  modified_base 13: mod_base = OTHER; note = 2'O-methyl-adenosine
  modified_base 14: mod_base = OTHER; note = 2'Fluoro-adenosine
  modified_base 15: mod_base = gm
  modified_base 16: mod_base = OTHER; note = 2' Fluoro-guanosine
  modified_base 17: mod_base = um
  modified_base 18: mod_base = gm
  modified_base 19: mod_base = gm
  modified_base 20: mod_base = OTHER; note = 2'O-methyl-adenosine
  modified_base 21: mod_base = gm
  modified_base 22: mod_base = gm
  modified_base 23: mod_base = cm
  misc_feature 1^2: note = phosphorothioate linkage
  misc_feature 2^3: note = phosphorothioate linkage
  misc_feature 21^22: note = phosphorothioate linkage
  misc_feature 22^23: note = phosphorothioate linkage
aacttcttgtcaaaggtggaggc

SEQ ID NO: 797 - RNA, 23 nt, synthetic construct
  source 1..23: mol_type = other RNA
  misc_feature 1..23: note = Antisense: ETXS2152; corresponding to SEQ ID NO: 789
  modified_base 1: mod_base = um
  modified_base 2: mod_base = OTHER; note = 2' Fluoro-guanosine
  modified_base 3: mod_base = um
  modified_base 4: mod_base = gm
  modified_base 5: mod_base = gm
  modified_base 6: mod_base = OTHER; note = 2'Fluoro-adenosine
  modified_base 7: mod_base = um
  modified_base 8: mod_base = OTHER; note = 2' Fluoro-guanosine
  modified_base 9: mod_base = OTHER; note = 2'Fluoro-adenosine
  modified_base 10: mod_base = OTHER; note = 2'O-methyl-adenosine
  modified_base 11: mod_base = gm
  modified_base 12: mod_base = gm
  modified_base 13: mod_base = cm
  modified_base 14: mod_base = OTHER; note = 2'Fluoro-adenosine
  modified_base 15: mod_base = OTHER; note = 2'O-methyl-adenosine
  modified_base 16: mod_base = OTHER; note = 2'Fluoro-adenosine
  modified_base 17: mod_base = gm
  modified_base 18: mod_base = cm
  modified_base 19: mod_base = um
  modified_base 20: mod_base = OTHER; note = 2'O-methyl-adenosine
  modified_base 21: mod_base = cm
  modified_base 22: mod_base = cm
  modified_base 23: mod_base = cm
  misc_feature 1^2: note = phosphorothioate linkage
  misc_feature 2^3: note = phosphorothioate linkage
  misc_feature 21^22: note = phosphorothioate linkage
  misc_feature 22^23: note = phosphorothioate linkage
tgtggatgaaggcaaagctaccc

SEQ ID NO: 798 - RNA, 21 nt, synthetic construct
  source 1..21: mol_type = other RNA
  misc_feature 1..21: note = Description: ZPI siRNA sense strand: ETXS2127; corresponding to SEQ ID NO: 791
  modified_base 1: mod_base = gm
  modified_base 2: mod_base = cm
  modified_base 3: mod_base = cm
  modified_base 4: mod_base = um
  modified_base 5: mod_base = um
  modified_base 6: mod_base = cm
  modified_base 7: mod_base = OTHER; note = Af
  modified_base 8: mod_base = um
  modified_base 9: mod_base = OTHER; note = 2' Fluoro-cytidine
  modified_base 10: mod_base = OTHER; note = 2' Fluoro-cytidine
  modified_base 11: mod_base = OTHER; note = Af
  modified_base 12: mod_base = cm
  modified_base 13: mod_base = OTHER; note = 2'O-methyl-adenosine
  modified_base 14: mod_base = OTHER; note = 2'O-methyl-adenosine
  modified_base 15: mod_base = gm
  modified_base 16: mod_base = gm
  modified_base 17: mod_base = OTHER; note = 2'O-methyl-adenosine
  modified_base 18: mod_base = cm
  modified_base 19: mod_base = um
  modified_base 20: mod_base = um
  modified_base 21: mod_base = um
  misc_feature 1^2: note = phosphorothioate linkage
  misc_feature 2^3: note = phosphorothioate linkage
gccttcatccacaaggacttt

SEQ ID NO: 799 - RNA, 21 nt, synthetic construct
  source 1..21: mol_type = other RNA
  misc_feature 1..21: note = Description: ZPI siRNA sense strand: ETXS2143; corresponding to SEQ ID NO: 792
  modified_base 1: mod_base = cm
  modified_base 2: mod_base = um
  modified_base 3: mod_base = cm
  modified_base 4: mod_base = cm
  modified_base 5: mod_base = OTHER; note = 2'O-methyl-adenosine
  modified_base 6: mod_base = cm
  modified_base 7: mod_base = OTHER; note = 2' Fluoro-cytidine
  modified_base 8: mod_base = um
  modified_base 9: mod_base = OTHER; note = 2' Fluoro-uridine
  modified_base 10: mod_base = OTHER; note = 2' Fluoro-uridine
  modified_base 11: mod_base = OTHER; note = 2' Fluoro-guanosine
  modified_base 12: mod_base = OTHER; note = 2'O-methyl-adenosine
  modified_base 13: mod_base = cm
  modified_base 14: mod_base = OTHER; note = 2'O-methyl-adenosine
  modified_base 15: mod_base = OTHER; note = 2'O-methyl-adenosine
  modified_base 16: mod_base = gm
  modified_base 17: mod_base = OTHER; note = 2'O-methyl-adenosine
  modified_base 18: mod_base = OTHER; note = 2'O-methyl-adenosine
  modified_base 19: mod_base = gm
  modified_base 20: mod_base = um
  modified_base 21: mod_base = um
  misc_feature 1^2: note = phosphorothioate linkage
  misc_feature 2^3: note = phosphorothioate linkage
ctccacctttgacaagaagtt

SEQ ID NO: 800 - RNA, 21 nt, synthetic construct
  source 1..21: mol_type = other RNA
  misc_feature 1..21: note = Description: ZPI siRNA sense strand: ETXS2151; corresponding to SEQ ID NO: 793
  modified_base 1: mod_base = gm
  modified_base 2: mod_base = um
  modified_base 3: mod_base = OTHER; note = 2'O-methyl-adenosine
  modified_base 4: mod_base = gm
  modified_base 5: mod_base = cm
  modified_base 6: mod_base = um
  modified_base 7: mod_base = OTHER; note = 2' Fluoro-uridine
  modified_base 8: mod_base = um
  modified_base 9: mod_base = OTHER; note = 2' Fluoro-guanosine
  modified_base 10: mod_base = OTHER; note = 2' Fluoro-cytidine
  modified_base 11: mod_base = OTHER; note = 2' Fluoro-cytidine
  modified_base 12: mod_base = um
  modified_base 13: mod_base = um
  modified_base 14: mod_base = cm
  modified_base 15: mod_base = OTHER; note = 2'O-methyl-adenosine
  modified_base 16: mod_base = um
  modified_base 17: mod_base = cm
  modified_base 18: mod_base = cm
  modified_base 19: mod_base = OTHER; note = 2'O-methyl-adenosine
  modified_base 20: mod_base = cm
  modified_base 21: mod_base = OTHER; note = 2'O-methyl-adenosine
  misc_feature 1^2: note = phosphorothioate linkage
  misc_feature 2^3: note = phosphorothioate linkage
gtagctttgccttcatccaca

SEQ ID NO: 801 - RNA, 23 nt, synthetic construct
  misc_feature 1..23: note = Description of sequence: ZPI siRNA antisense strand, modified; Strand ID: ETXS2398; Based on: SEQ ID NO: 145
  source 1..23: mol_type = other RNA
  misc_feature 1^2: note = phosphorothioate linkage
  misc_feature 2^3: note = phosphorothioate linkage
  misc_feature 21^22: note = phosphorothioate linkage
  misc_feature 22^23: note = phosphorothioate linkage
  modified_base 1: mod_base = cm
  modified_base 2: mod_base = OTHER; note = 2'Fluoro-adenosine
  modified_base 3: mod_base = um
  modified_base 4: mod_base = gm
  modified_base 5: mod_base = gm
  modified_base 6: mod_base = OTHER; note = 2'Fluoro-uridine
  modified_base 7: mod_base = gm
  modified_base 8: mod_base = cm
  modified_base 9: mod_base = OTHER; note = 2'Fluoro-cytidine
  modified_base 10: mod_base = OTHER; note = 2'O-methyl-adenosine
  modified_base 11: mod_base = um
  modified_base 12: mod_base = um
  modified_base 13: mod_base = um
  modified_base 14: mod_base = OTHER; note = 2'Fluoro-cytidine
  modified_base 15: mod_base = cm
  modified_base 16: mod_base = OTHER; note = 2'Fluoro-uridine
  modified_base 17: mod_base = um
  modified_base 18: mod_base = gm
  modified_base 19: mod_base = gm
  modified_base 20: mod_base = um
  modified_base 21: mod_base = OTHER; note = 2'O-methyl-adenosine
  modified_base 22: mod_base = gm
  modified_base 23: mod_base = gm
catggtggcatttccttggtagg

SEQ ID NO: 802 - RNA, 23 nt, synthetic construct
  misc_feature 1..23: note = Description of sequence: ZPI siRNA antisense strand, modified; Strand ID: ETSX2400; Based on: SEQ ID NO: 145
  source 1..23: mol_type = other RNA
  misc_feature 1^2: note = phosphorothioate linkage
  misc_feature 2^3: note = phosphorothioate linkage
  misc_feature 21^22: note = phosphorothioate linkage
  misc_feature 22^23: note = phosphorothioate linkage
  modified_base 1: mod_base = cm
  modified_base 2: mod_base = OTHER; note = 2'Fluoro-adenosine
  modified_base 3: mod_base = um
  modified_base 4: mod_base = gm
  modified_base 5: mod_base = gm
  modified_base 6: mod_base = OTHER; note = 2'Fluoro-uridine
  modified_base 7: mod_base = gm
  modified_base 8: mod_base = gm
  modified_base 9: mod_base = cm
  modified_base 10: mod_base = OTHER; note = 2'O-methyl-adenosine
  modified_base 11: mod_base = um
  modified_base 12: mod_base = um
  modified_base 13: mod_base = um
  modified_base 14: mod_base = OTHER; note = 2'Fluoro-cytidine
  modified_base 15: mod_base = cm
  modified_base 16: mod_base = OTHER; note = 2'Fluoro-uridine
  modified_base 17: mod_base = um
  modified_base 18: mod_base = OTHER; note = 2'Fluoro-guanosine
  modified_base 19: mod_base = gm
  modified_base 20: mod_base = um
  modified_base 21: mod_base = OTHER; note = 2'O-methyl-adenosine
  modified_base 22: mod_base = gm
  modified_base 23: mod_base = gm
catggtggcatttccttggtagg

SEQ ID NO: 803 - RNA, 23 nt, synthetic construct
  misc_feature 1..23: note = Description of sequence: ZPI siRNA antisense strand, modified; Strand ID: ETXS2402; Based on: SEQ ID NO: 145
  source 1..23: mol_type = other RNA
  misc_feature 1^2: note = phosphorothioate linkage
  misc_feature 2^3: note = phosphorothioate linkage
  misc_feature 21^22: note = phosphorothioate linkage
  misc_feature 22^23: note = phosphorothioate linkage
  modified_base 1: mod_base = cm
  modified_base 2: mod_base = OTHER; note = 2'Fluoro-adenosine
  modified_base 3: mod_base = um
  modified_base 4: mod_base = gm
  modified_base 5: mod_base = gm
  modified_base 6: mod_base = OTHER; note = thermally destabilized analogue of uridine
  modified_base 7: mod_base = gm
  modified_base 8: mod_base = gm
  modified_base 9: mod_base = cm
  modified_base 10: mod_base = OTHER; note = 2'O-methyl-adenosine
  modified_base 11: mod_base = um
  modified_base 12: mod_base = um
  modified_base 13: mod_base = um
  modified_base 14: mod_base = OTHER; note = 2'Fluoro-cytidine
  modified_base 15: mod_base = cm
  modified_base 16: mod_base = OTHER; note = 2'Fluoro-uridine
  modified_base 17: mod_base = um
  modified_base 18: mod_base = gm
  modified_base 19: mod_base = gm
  modified_base 20: mod_base = um
  modified_base 21: mod_base = OTHER; note = 2'O-methyl-adenosine
  modified_base 22: mod_base = gm
  modified_base 23: mod_base = gm
catggtggcatttccttggtagg

SEQ ID NO: 804 - RNA, 23 nt, synthetic construct
  misc_feature 1..23: note = Description of sequence: ZPI siRNA antisense strand, modified; Strand ID: ETXS2404; Based on: SEQ ID NO: 145
  source 1..23: mol_type = other RNA
  misc_feature 1^2: note = phosphorothioate linkage
  misc_feature 2^3: note = phosphorothioate linkage
  misc_feature 21^22: note = phosphorothioate linkage
  misc_feature 22^23: note = phosphorothioate linkage
  modified_base 1: mod_base = cm
  modified_base 2: mod_base = OTHER; note = 2'Fluoro-adenosine
  modified_base 3: mod_base = um
  modified_base 4: mod_base = gm
  modified_base 5: mod_base = gm
  modified_base 6: mod_base = OTHER; note = thermally destabilized analogue of uridine
  modified_base 7: mod_base = gm
  modified_base 8: mod_base = OTHER; note = 2'Fluoro-guanosine
  modified_base 9: mod_base = OTHER; note = 2'Fluoro-cytidine
  modified_base 10: mod_base = OTHER; note = 2'O-methyl-adenosine
  modified_base 11: mod_base = um
  modified_base 12: mod_base = um
  modified_base 13: mod_base = um
  modified_base 14: mod_base = OTHER; note = 2'Fluoro-cytidine
  modified_base 15: mod_base = cm
  modified_base 16: mod_base = OTHER; note = 2'Fluoro-uridine
  modified_base 17: mod_base = um
  modified_base 18: mod_base = gm
  modified_base 19: mod_base = gm
  modified_base 20: mod_base = um
  modified_base 21: mod_base = OTHER; note = 2'O-methyl-adenosine
  modified_base 22: mod_base = gm
  modified_base 23: mod_base = gm
catggtggcatttccttggtagg

SEQ ID NO: 805 - RNA, 23 nt, synthetic construct
  misc_feature 1..23: note = Description of sequence: ZPI siRNA antisense strand, modified; Strand ID: ETXS2406; Based on: SEQ ID NO: 145
  source 1..23: mol_type = other RNA
  misc_feature 1^2: note = phosphorothioate linkage
  misc_feature 2^3: note = phosphorothioate linkage
  misc_feature 21^22: note = phosphorothioate linkage
  misc_feature 22^23: note = phosphorothioate linkage
  modified_base 1: mod_base = cm
  modified_base 2: mod_base = OTHER; note = 2'Fluoro-adenosine
  modified_base 3: mod_base = um
  modified_base 4: mod_base = gm
  modified_base 5: mod_base = gm
  modified_base 6: mod_base = OTHER; note = 2'Fluoro-uridine
  modified_base 7: mod_base = gm
  modified_base 8: mod_base = gm
  modified_base 9: mod_base = cm
  modified_base 10: mod_base = OTHER; note = 2'O-methyl-adenosine
  modified_base 11: mod_base = um
  modified_base 12: mod_base = um
  modified_base 13: mod_base = um
  modified_base 14: mod_base = OTHER; note = 2'Fluoro-cytidine
  modified_base 15: mod_base = cm
  modified_base 16: mod_base = OTHER; note = 2'Fluoro-uridine
  modified_base 17: mod_base = um
  modified_base 18: mod_base = gm
  modified_base 19: mod_base = gm
  modified_base 20: mod_base = OTHER; note = 2'Fluoro-uridine
  modified_base 21: mod_base = OTHER; note = 2'O-methyl-adenosine
  modified_base 22: mod_base = gm
  modified_base 23: mod_base = gm
catggtggcatttccttggtagg

SEQ ID NO: 806 - RNA, 23 nt, synthetic construct
  misc_feature 1..23: note = Description of sequence: ZPI siRNA antisense strand, modified; Strand ID: ETXS2408; Based on: SEQ ID NO: 145
  source 1..23: mol_type = other RNA
  misc_feature 1^2: note = phosphorothioate linkage
  misc_feature 2^3: note = phosphorothioate linkage
  misc_feature 21^22: note = phosphorothioate linkage
  misc_feature 22^23: note = phosphorothioate linkage
  modified_base 1: mod_base = cm
  modified_base 2: mod_base = OTHER; note = 2'Fluoro-adenosine
  modified_base 3: mod_base = um
  modified_base 4: mod_base = OTHER; note = 2'Fluoro-guanosine
  modified_base 5: mod_base = gm
  modified_base 6: mod_base = OTHER; note = 2'Fluoro-uridine
  modified_base 7: mod_base = gm
  modified_base 8: mod_base = gm
  modified_base 9: mod_base = cm
  modified_base 10: mod_base = OTHER; note = 2'O-methyl-adenosine
  modified_base 11: mod_base = um
  modified_base 12: mod_base = um
  modified_base 13: mod_base = um
  modified_base 14: mod_base = OTHER; note = 2'Fluoro-cytidine
  modified_base 15: mod_base = cm
  modified_base 16: mod_base = OTHER; note = 2'Fluoro-uridine
  modified_base 17: mod_base = um
  modified_base 18: mod_base = gm
  modified_base 19: mod_base = gm
  modified_base 20: mod_base = um
  modified_base 21: mod_base = OTHER; note = 2'O-methyl-adenosine
  modified_base 22: mod_base = gm
  modified_base 23: mod_base = gm
catggtggcatttccttggtagg

SEQ ID NO: 807 - RNA, 23 nt, synthetic construct
  misc_feature 1..23: note = Description of sequence: ZPI siRNA antisense strand, modified; Strand ID: ETXS2410; Based on: SEQ ID NO: 145
  source 1..23: mol_type = other RNA
  misc_feature 1^2: note = phosphorothioate linkage
  misc_feature 2^3: note = phosphorothioate linkage
  misc_feature 21^22: note = phosphorothioate linkage
  misc_feature 22^23: note = phosphorothioate linkage
  modified_base 1: mod_base = cm
  modified_base 2: mod_base = OTHER; note = 2'Fluoro-adenosine
  modified_base 3: mod_base = um
  modified_base 4: mod_base = OTHER; note = 2'Fluoro-guanosine
  modified_base 5: mod_base = gm
  modified_base 6: mod_base = OTHER; note = 2'Fluoro-uridine
  modified_base 7: mod_base = gm
  modified_base 8: mod_base = OTHER; note = 2'Fluoro-guanosine
  modified_base 9: mod_base = OTHER; note = 2'Fluoro-cytidine
  modified_base 10: mod_base = OTHER; note = 2'O-methyl-adenosine
  modified_base 11: mod_base = um
  modified_base 12: mod_base = um
  modified_base 13: mod_base = um
  modified_base 14: mod_base = OTHER; note = 2'Fluoro-cytidine
  modified_base 15: mod_base = cm
  modified_base 16: mod_base = OTHER; note = 2'Fluoro-uridine
  modified_base 17: mod_base = um
  modified_base 18: mod_base = gm
  modified_base 19: mod_base = gm
  modified_base 20: mod_base = um
  modified_base 21: mod_base = OTHER; note = 2'O-methyl-adenosine
  modified_base 22: mod_base = gm
  modified_base 23: mod_base = gm
catggtggcatttccttggtagg

SEQ ID NO: 808 - RNA, 23 nt, synthetic construct
  misc_feature 1..23: note = Description of sequence: ZPI siRNA antisense strand, modified; Strand ID: ETXS2412; Based on: SEQ ID NO: 145
  source 1..23: mol_type = other RNA
  misc_feature 1^2: note = phosphorothioate linkage
  misc_feature 2^3: note = phosphorothioate linkage
  misc_feature 21^22: note = phosphorothioate linkage
  misc_feature 22^23: note = phosphorothioate linkage
  modified_base 1: mod_base = cm
  modified_base 2: mod_base = OTHER; note = 2'Fluoro-adenosine
  modified_base 3: mod_base = um
  modified_base 4: mod_base = gm
  modified_base 5: mod_base = gm
  modified_base 6: mod_base = OTHER; note = 2'Fluoro-uridine
  modified_base 7: mod_base = gm
  modified_base 8: mod_base = OTHER; note = 2'Fluoro-guanosine
  modified_base 9: mod_base = OTHER; note = 2'Fluoro-cytidine
  modified_base 10: mod_base = OTHER; note = 2'O-methyl-adenosine
  modified_base 11: mod_base = um
  modified_base 12: mod_base = um
  modified_base 13: mod_base = um
  modified_base 14: mod_base = OTHER; note = 2'Fluoro-cytidine
  modified_base 15: mod_base = cm
  modified_base 16: mod_base = OTHER; note = 2'Fluoro-uridine
  modified_base 17: mod_base = um
  modified_base 18: mod_base = OTHER; note = 2'Fluoro-guanosine
  modified_base 19: mod_base = gm
  modified_base 20: mod_base = um
  modified_base 21: mod_base = OTHER; note = 2'O-methyl-adenosine
  modified_base 22: mod_base = gm
  modified_base 23: mod_base = gm
catggtggcatttccttggtagg

SEQ ID NO: 809 - RNA, 23 nt, synthetic construct
  misc_feature 1..23: note = Description of sequence: ZPI siRNA antisense strand, modified; Strand ID: ETXS2414; Based on: SEQ ID NO: 145
  source 1..23: mol_type = other RNA
  misc_feature 1^2: note = phosphorothioate linkage
  misc_feature 2^3: note = phosphorothioate linkage
  misc_feature 21^22: note = phosphorothioate linkage
  misc_feature 22^23: note = phosphorothioate linkage
  modified_base 1: mod_base = cm
  modified_base 2: mod_base = OTHER; note = 2'Fluoro-adenosine
  modified_base 3: mod_base = um
  modified_base 4: mod_base = gm
  modified_base 5: mod_base = gm
  modified_base 6: mod_base = OTHER; note = 2'Fluoro-uridine
  modified_base 7: mod_base = gm
  modified_base 8: mod_base = OTHER; note = 2'Fluoro-guanosine
  modified_base 9: mod_base = OTHER; note = 2'Fluoro-cytidine
  modified_base 10: mod_base = OTHER; note = 2'O-methyl-adenosine
  modified_base 11: mod_base = um
  modified_base 12: mod_base = um
  modified_base 13: mod_base = um
  modified_base 14: mod_base = OTHER; note = 2'Fluoro-cytidine
  modified_base 15: mod_base = cm
  modified_base 16: mod_base = OTHER; note = 2'Fluoro-uridine
  modified_base 17: mod_base = um
  modified_base 18: mod_base = gm
  modified_base 19: mod_base = gm
  modified_base 20: mod_base = OTHER; note = 2'Fluoro-uridine
  modified_base 21: mod_base = OTHER; note = 2'O-methyl-adenosine
  modified_base 22: mod_base = gm
  modified_base 23: mod_base = gm
catggtggcatttccttggtagg

SEQ ID NO: 810 - RNA, 23 nt, synthetic construct
  misc_feature 1..23: note = Description of sequence: ZPI siRNA antisense strand, modified; Strand ID: ETXS2416; Based on: SEQ ID NO: 148
  source 1..23: mol_type = other RNA
  misc_feature 1^2: note = phosphorothioate linkage
  misc_feature 2^3: note = phosphorothioate linkage
  misc_feature 21^22: note = phosphorothioate linkage
  misc_feature 22^23: note = phosphorothioate linkage
  modified_base 1: mod_base = um
  modified_base 2: mod_base = OTHER; note = 2'Fluoro-cytidine
  modified_base 3: mod_base = gm
  modified_base 4: mod_base = um
  modified_base 5: mod_base = gm
  modified_base 6: mod_base = OTHER; note = 2'Fluoro-cytidine
  modified_base 7: mod_base = cm
  modified_base 8: mod_base = um
  modified_base 9: mod_base = OTHER; note = 2'Fluoro-cytidine
  modified_base 10: mod_base = OTHER; note = 2'O-methyl-adenosine
  modified_base 11: mod_base = um
  modified_base 12: mod_base = gm
  modified_base 13: mod_base = gm
  modified_base 14: mod_base = OTHER; note = 2'Fluoro-adenosine
  modified_base 15: mod_base = gm
  modified_base 16: mod_base = OTHER; note = 2'Fluoro-adenosine
  modified_base 17: mod_base = um
  modified_base 18: mod_base = cm
  modified_base 19: mod_base = um
  modified_base 20: mod_base = um
  modified_base 21: mod_base = um
  modified_base 22: mod_base = cm
  modified_base 23: mod_base = gm
tcgtgcctcatggagatctttcg

SEQ ID NO: 811 - RNA, 23 nt, synthetic construct
  misc_feature 1..23: note = Description of sequence: ZPI siRNA antisense strand, modified; Strand ID: ETXS2418; Based on: SEQ ID NO: 148
  source 1..23: mol_type = other RNA
  misc_feature 1^2: note = phosphorothioate linkage
  misc_feature 2^3: note = phosphorothioate linkage
  misc_feature 21^22: note = phosphorothioate linkage
  misc_feature 22^23: note = phosphorothioate linkage
  modified_base 1: mod_base = um
  modified_base 2: mod_base = OTHER; note = 2'Fluoro-cytidine
  modified_base 3: mod_base = gm
  modified_base 4: mod_base = um
  modified_base 5: mod_base = gm
  modified_base 6: mod_base = OTHER; note = 2'Fluoro-cytidine
  modified_base 7: mod_base = cm
  modified_base 8: mod_base = um
  modified_base 9: mod_base = cm
  modified_base 10: mod_base = OTHER; note = 2'O-methyl-adenosine
  modified_base 11: mod_base = um
  modified_base 12: mod_base = gm
  modified_base 13: mod_base = gm
  modified_base 14: mod_base = OTHER; note = 2'Fluoro-adenosine
  modified_base 15: mod_base = gm
  modified_base 16: mod_base = OTHER; note = 2'Fluoro-adenosine
  modified_base 17: mod_base = um
  modified_base 18: mod_base = OTHER; note = 2'Fluoro-cytidine
  modified_base 19: mod_base = um
  modified_base 20: mod_base = um
  modified_base 21: mod_base = um
  modified_base 22: mod_base = cm
  modified_base 23: mod_base = gm
tcgtgcctcatggagatctttcg

SEQ ID NO: 812 - RNA, 23 nt, synthetic construct
  misc_feature 1..23: note = Description of sequence: ZPI siRNA antisense strand, modified; Strand ID: ETXS2420; Based on: SEQ ID NO: 148
  source 1..23: mol_type = other RNA
  misc_feature 1^2: note = phosphorothioate linkage
  misc_feature 2^3: note = phosphorothioate linkage
  misc_feature 21^22: note = phosphorothioate linkage
  misc_feature 22^23: note = phosphorothioate linkage
  modified_base 1: mod_base = um
  modified_base 2: mod_base = OTHER; note = 2'Fluoro-cytidine
  modified_base 3: mod_base = gm
  modified_base 4: mod_base = um
  modified_base 5: mod_base = gm
  modified_base 6: mod_base = OTHER; note = thermally destabilized analogue of cytidine
  modified_base 7: mod_base = cm
  modified_base 8: mod_base = um
  modified_base 9: mod_base = cm
  modified_base 10: mod_base = OTHER; note = 2'O-methyl-adenosine
  modified_base 11: mod_base = um
  modified_base 12: mod_base = gm
  modified_base 13: mod_base = gm
  modified_base 14: mod_base = OTHER; note = 2'Fluoro-adenosine
  modified_base 15: mod_base = gm
  modified_base 16: mod_base = OTHER; note = 2'Fluoro-adenosine
  modified_base 17: mod_base = um
  modified_base 18: mod_base = cm
  modified_base 19: mod_base = um
  modified_base 20: mod_base = um
  modified_base 21: mod_base = um
  modified_base 22: mod_base = cm
  modified_base 23: mod_base = gm
tcgtgcctcatggagatctttcg

SEQ ID NO: 813 - RNA, 23 nt, synthetic construct
  misc_feature 1..23: note = Description of sequence: ZPI siRNA antisense strand, modified; Strand ID: ETXS2422; Based on: SEQ ID NO: 148
  source 1..23: mol_type = other RNA
  misc_feature 1^2: note = phosphorothioate linkage
  misc_feature 2^3: note = phosphorothioate linkage
  misc_feature 21^22: note = phosphorothioate linkage
  misc_feature 22^23: note = phosphorothioate linkage
  modified_base 1: mod_base = um
  modified_base 2: mod_base = OTHER; note = 2'Fluoro-cytidine
  modified_base 3: mod_base = gm
  modified_base 4: mod_base = um
  modified_base 5: mod_base = gm
  modified_base 6: mod_base = OTHER; note = thermally destabilized analogue of cytidine
  modified_base 7: mod_base = cm
  modified_base 8: mod_base = OTHER; note = 2'Fluoro-uridine
  modified_base 9: mod_base = OTHER; note = 2'Fluoro-cytidine
  modified_base 10: mod_base = OTHER; note = 2'O-methyl-adenosine
  modified_base 11: mod_base = um
  modified_base 12: mod_base = gm
  modified_base 13: mod_base = gm
  modified_base 14: mod_base = OTHER; note = 2'Fluoro-adenosine
  modified_base 15: mod_base = gm
  modified_base 16: mod_base = OTHER; note = 2'Fluoro-adenosine
  modified_base 17: mod_base = um
  modified_base 18: mod_base = cm
  modified_base 19: mod_base = um
  modified_base 20: mod_base = um
  modified_base 21: mod_base = um
  modified_base 22: mod_base = cm
  modified_base 23: mod_base = gm
tcgtgcctcatggagatctttcg

SEQ ID NO: 814 - RNA, 23 nt, synthetic construct
  misc_feature 1..23: note = Description of sequence: ZPI siRNA antisense strand, modified; Strand ID: ETXS2424; Based on: SEQ ID NO: 148
  source 1..23: mol_type = other RNA
  misc_feature 1^2: note = phosphorothioate linkage
  misc_feature 2^3: note = phosphorothioate linkage
  misc_feature 21^22: note = phosphorothioate linkage
  misc_feature 22^23: note = phosphorothioate linkage
  modified_base 1: mod_base = um
  modified_base 2: mod_base = OTHER; note = 2'Fluoro-cytidine
  modified_base 3: mod_base = gm
  modified_base 4: mod_base = um
  modified_base 5: mod_base = gm
  modified_base 6: mod_base = OTHER; note = 2'Fluoro-cytidine
  modified_base 7: mod_base = cm
  modified_base 8: mod_base = um
  modified_base 9: mod_base = cm
  modified_base 10: mod_base = OTHER; note = 2'O-methyl-adenosine
  modified_base 11: mod_base = um
  modified_base 12: mod_base = gm
  modified_base 13: mod_base = gm
  modified_base 14: mod_base = OTHER; note = 2'Fluoro-adenosine
  modified_base 15: mod_base = gm
  modified_base 16: mod_base = OTHER; note = 2'Fluoro-adenosine
  modified_base 17: mod_base = um
  modified_base 18: mod_base = cm
  modified_base 19: mod_base = um
  modified_base 20: mod_base = OTHER; note = 2'Fluoro-uridine
  modified_base 21: mod_base = um
  modified_base 22: mod_base = cm
  modified_base 23: mod_base = gm
tcgtgcctcatggagatctttcg

SEQ ID NO: 815 - RNA, 23 nt, synthetic construct
  misc_feature 1..23: note = Description of sequence: ZPI siRNA antisense strand, modified; Strand ID: ETXS2426; Based on: SEQ ID NO: 148
  source 1..23: mol_type = other RNA
  misc_feature 1^2: note = phosphorothioate linkage
  misc_feature 2^3: note = phosphorothioate linkage
  misc_feature 21^22: note = phosphorothioate linkage
  misc_feature 22^23: note = phosphorothioate linkage
  modified_base 1: mod_base = um
  modified_base 2: mod_base = OTHER; note = 2'Fluoro-cytidine
  modified_base 3: mod_base = gm
  modified_base 4: mod_base = OTHER; note = 2'Fluoro-uridine
  modified_base 5: mod_base = gm
  modified_base 6: mod_base = OTHER; note = 2'Fluoro-cytidine
  modified_base 7: mod_base = cm
  modified_base 8: mod_base = um
  modified_base 9: mod_base = cm
  modified_base 10: mod_base = OTHER; note = 2'O-methyl-adenosine
  modified_base 11: mod_base = um
  modified_base 12: mod_base = gm
  modified_base 13: mod_base = gm
  modified_base 14: mod_base = OTHER; note = 2'Fluoro-adenosine
  modified_base 15: mod_base = gm
  modified_base 16: mod_base = OTHER; note = 2'Fluoro-adenosine
  modified_base 17: mod_base = um
  modified_base 18: mod_base = cm
  modified_base 19: mod_base = um
  modified_base 20: mod_base = um
  modified_base 21: mod_base = um
  modified_base 22: mod_base = cm
  modified_base 23: mod_base = gm
tcgtgcctcatggagatctttcg

SEQ ID NO: 816 - RNA, 23 nt, synthetic construct
  misc_feature 1..23: note = Description of sequence: ZPI siRNA antisense strand, modified; Strand ID: ETXS2428; Based on: SEQ ID NO: 148
  source 1..23: mol_type = other RNA
  misc_feature 1^2: note = phosphorothioate linkage
  misc_feature 2^3: note = phosphorothioate linkage
  misc_feature 21^22: note = phosphorothioate linkage
  misc_feature 22^23: note = phosphorothioate linkage
  modified_base 1: mod_base = um
  modified_base 2: mod_base = OTHER; note = 2'Fluoro-cytidine
  modified_base 3: mod_base = gm
  modified_base 4: mod_base = OTHER; note = 2'Fluoro-uridine
  modified_base 5: mod_base = gm
  modified_base 6: mod_base = OTHER; note = 2'Fluoro-cytidine
  modified_base 7: mod_base = cm
  modified_base 8: mod_base = OTHER; note = 2'Fluoro-uridine
  modified_base 9: mod_base = OTHER; note = 2'Fluoro-cytidine
  modified_base 10: mod_base = OTHER; note = 2'O-methyl-adenosine
  modified_base 11: mod_base = um
  modified_base 12: mod_base = gm
  modified_base 13: mod_base = gm
  modified_base 14: mod_base = OTHER; note = 2'Fluoro-adenosine
  modified_base 15: mod_base = gm
  modified_base 16: mod_base = OTHER; note = 2'Fluoro-adenosine
  modified_base 17: mod_base = um
  modified_base 18: mod_base = cm
  modified_base 19: mod_base = um
  modified_base 20: mod_base = um
  modified_base 21: mod_base = um
  modified_base 22: mod_base = cm
  modified_base 23: mod_base = gm
tcgtgcctcatggagatctttcg

SEQ ID NO: 817 - RNA, 23 nt, synthetic construct
  misc_feature 1..23: note = Description of sequence: ZPI siRNA antisense strand, modified; Strand ID: ETXS2430; Based on: SEQ ID NO: 148
  source 1..23: mol_type = other RNA
  misc_feature 1^2: note = phosphorothioate linkage
  misc_feature 2^3: note = phosphorothioate linkage
  misc_feature 21^22: note = phosphorothioate linkage
  misc_feature 22^23: note = phosphorothioate linkage
  modified_base 1: mod_base = um
  modified_base 2: mod_base = OTHER; note = 2'Fluoro-cytidine
  modified_base 3: mod_base = gm
  modified_base 4: mod_base = um
  modified_base 5: mod_base = gm
  modified_base 6: mod_base = OTHER; note = 2'Fluoro-cytidine
  modified_base 7: mod_base = cm
  modified_base 8: mod_base = OTHER; note = 2'Fluoro-uridine
  modified_base 9: mod_base = OTHER; note = 2'Fluoro-cytidine
  modified_base 10: mod_base = OTHER; note = 2'O-methyl-adenosine
  modified_base 11: mod_base = um
  modified_base 12: mod_base = gm
  modified_base 13: mod_base = gm
  modified_base 14: mod_base = OTHER; note = 2'Fluoro-adenosine
  modified_base 15: mod_base = gm
  modified_base 16: mod_base = OTHER; note = 2'Fluoro-adenosine
  modified_base 17: mod_base = um
  modified_base 18: mod_base = OTHER; note = 2'Fluoro-cytidine
  modified_base 19: mod_base = um
  modified_base 20: mod_base = um
  modified_base 21: mod_base = um
  modified_base 22: mod_base = cm
  modified_base 23: mod_base = gm
tcgtgcctcatggagatctttcg

SEQ ID NO: 818 - RNA, 23 nt, synthetic construct
  misc_feature 1..23: note = Description of sequence: ZPI siRNA antisense strand, modified; Strand ID: ETXS2432; Based on: SEQ ID NO: 148
  source 1..23: mol_type = other RNA
  misc_feature 1^2: note = phosphorothioate linkage
  misc_feature 2^3: note = phosphorothioate linkage
  misc_feature 21^22: note = phosphorothioate linkage
  misc_feature 22^23: note = phosphorothioate linkage
  modified_base 1: mod_base = um
  modified_base 2: mod_base = OTHER; note = 2'Fluoro-cytidine
  modified_base 3: mod_base = gm
  modified_base 4: mod_base = um
  modified_base 5: mod_base = gm
  modified_base 6: mod_base = OTHER; note = 2'Fluoro-cytidine
  modified_base 7: mod_base = cm
  modified_base 8: mod_base = OTHER; note = 2'Fluoro-uridine
  modified_base 9: mod_base = OTHER; note = 2'Fluoro-cytidine
  modified_base 10: mod_base = OTHER; note = 2'O-methyl-adenosine
  modified_base 11: mod_base = um
  modified_base 12: mod_base = gm
  modified_base 13: mod_base = gm
  modified_base 14: mod_base = OTHER; note = 2'Fluoro-adenosine
  modified_base 15: mod_base = gm
  modified_base 16: mod_base = OTHER; note = 2'Fluoro-adenosine
  modified_base 17: mod_base = um
  modified_base 18: mod_base = cm
  modified_base 19: mod_base = um
  modified_base 20: mod_base = OTHER; note = 2'Fluoro-uridine
  modified_base 21: mod_base = um
  modified_base 22: mod_base = cm
  modified_base 23: mod_base = gm
tcgtgcctcatggagatctttcg

SEQ ID NO: 819 - RNA, 21 nt, synthetic construct
  misc_feature 1..21: note = Description of sequence: ZPI siRNA sense strand, modified; Strand ID: ETXS2397; Based on: SEQ ID NO: 265
  source 1..21: mol_type = other RNA
  misc_feature 1^2: note = phosphorothioate linkage
  misc_feature 2^3: note = phosphorothioate linkage
  modified_base <1: mod_base = OTHER; note = two abasic inverted nucleoside overhang
  modified_base 1: mod_base = um
  modified_base 2: mod_base = OTHER; note = 2'O-methyl-adenosine
  modified_base 3: mod_base = cm
  modified_base 4: mod_base = cm
  modified_base 5: mod_base = OTHER; note = 2'O-methyl-adenosine
  modified_base 6: mod_base = OTHER; note = 2'O-methyl-adenosine
  modified_base 7: mod_base = gm
  modified_base 8: mod_base = gm
  modified_base 9: mod_base = OTHER; note = 2'Fluoro-adenosine
  modified_base 10: mod_base = OTHER; note = 2'Fluoro-adenosine
  modified_base 11: mod_base = OTHER; note = 2'Fluoro-adenosine
  modified_base 12: mod_base = um
  modified_base 13: mod_base = gm
  modified_base 14: mod_base = cm
  modified_base 15: mod_base = cm
  modified_base 16: mod_base = OTHER; note = 2'O-methyl-adenosine
  modified_base 17: mod_base = cm
  modified_base 18: mod_base = cm
  modified_base 19: mod_base = OTHER; note = 2'O-methyl-adenosine
  modified_base 20: mod_base = um
  modified_base 21: mod_base = gm
taccaaggaaatgccaccatg

SEQ ID NO: 820 - RNA, 21 nt, synthetic construct
  misc_feature 1..21: note = Description of sequence: ZPI siRNA sense strand, modified; Strand ID: ETXS2399; Based on: SEQ ID NO: 268
  source 1..21: mol_type = other RNA
  misc_feature 1^2: note = phosphorothioate linkage
  misc_feature 2^3: note = phosphorothioate linkage
  modified_base <1: mod_base = OTHER; note = two abasic inverted nucleoside overhang
  modified_base 1: mod_base = OTHER; note = 2'O-methyl-adenosine
  modified_base 2: mod_base = OTHER; note = 2'O-methyl-adenosine
  modified_base 3: mod_base = OTHER; note = 2'O-methyl-adenosine
  modified_base 4: mod_base = gm
  modified_base 5: mod_base = OTHER; note = 2'O-methyl-adenosine
  modified_base 6: mod_base = um
  modified_base 7: mod_base = cm
  modified_base 8: mod_base = um
  modified_base 9: mod_base = OTHER; note = 2'Fluoro-cytidine
  modified_base 10: mod_base = OTHER; note = 2'Fluoro-cytidine
  modified_base 11: mod_base = OTHER; note = 2'Fluoro-adenosine
  modified_base 12: mod_base = um
  modified_base 13: mod_base = gm
  modified_base 14: mod_base = OTHER; note = 2'O-methyl-adenosine
  modified_base 15: mod_base = gm
  modified_base 16: mod_base = gm
  modified_base 17: mod_base = cm
  modified_base 18: mod_base = OTHER; note = 2'O-methyl-adenosine
  modified_base 19: mod_base = cm
  modified_base 20: mod_base = gm
  modified_base 21: mod_base = OTHER; note = 2'O-methyl-adenosine
aaagatctccatgaggcacga

1. A method of preventing or treating a disease related to a disorder of haemostasis, the method comprising administering a nucleic acid to an individual, wherein the nucleic acid inhibits the expression of ZPI, wherein the nucleic acid comprises a duplex region that comprises a first strand and a second strand, wherein the second strand that is at least partially complementary to the first strand, wherein the first strand is:
(i) at least partially complementary to a portion of RNA transcribed from the ZPI gene; and
(ii) comprises at least 17 contiguous nucleosides differing by 0 or 1 nucleosides from any one of the first strand sequences as listed in Table 2,
and wherein the first strand and the second strand comprise a nucleoside sequence differing by 0 or 1 nucleosides from any one of the following first and second sequences, respectively: (1) SEQ ID NO: 145 and SEQ ID NO: 265, (2) SEQ ID NO: 148 and SEQ ID NO: 268, (3) SEQ ID NO: 126 and SEQ ID NO: 246, (4) SEQ ID NO: 127 and SEQ ID NO: 247, (5) SEQ ID NO: 128 and SEQ ID NO: 248, (6) SEQ ID NO: 129 and SEQ ID NO: 249, (7) SEQ ID NO: 131 and SEQ ID NO: 251, (8) SEQ ID NO: 132 and SEQ ID NO: 252, (9) SEQ ID NO: 138 and SEQ ID NO: 258, (10) SEQ ID NO: 139 and SEQ ID NO: 259, (11) SEQ ID NO: 144 and SEQ ID NO: 264, (12) SEQ ID NO: 147 and SEQ ID NO: 267, (13) SEQ ID NO: 149 and SEQ ID NO: 269, (14) SEQ ID NO: 226 and SEQ ID NO: 346, (15) SEQ ID NO: 227 and SEQ ID NO: 347, (16) SEQ ID NO: 228 and SEQ ID NO: 348, (17) SEQ ID NO: 229 and SEQ ID NO: 349, (18) SEQ ID NO: 231 and SEQ ID NO: 351, (19) SEQ ID NO: 232 and SEQ ID NO: 352, (20) SEQ ID NO: 238 and SEQ ID NO: 358, and (21) SEQ ID NO: 239 and SEQ ID NO: 359.

2. The method of claim 1, wherein the first and second strands of the nucleic acid comprise a nucleoside sequence differing by 0 or 1 nucleosides from any one of the following first and second sequences, respectively: (1) SEQ ID NO: 128 and SEQ ID NO: 248, (2) SEQ ID NO: 144 and SEQ ID NO: 264, (3) SEQ ID NO: 148 and SEQ ID NO: 268, (4) SEQ ID NO: 149 and SEQ ID NO: 269, and (5) SEQ ID NO: 138 and SEQ ID NO: 258.

3. The method of claim 1, wherein the first and second strands of the nucleic acid comprise a nucleoside sequence differing by 0 or 1 nucleosides from any one of the following first and second sequences, respectively: (1) SEQ ID NO: 148 and SEQ ID NO: 268, (2) SEQ ID NO: 145 and SEQ ID NO: 265, (3) SEQ ID NO: 144 and SEQ ID NO: 264, and (4) SEQ ID NO: 165 and SEQ ID NO: 285.

4. The method of claim 1, wherein the first and second strands of the nucleic acid comprise a nucleoside sequence differing by 0 or 1 nucleosides from any one of the following first and second sequences, respectively: (1) SEQ ID NO: 145 and SEQ ID NO: 265, and (2) SEQ ID NO: 148 and SEQ ID NO: 268.

5. The method of claim 1, wherein the first strand of the nucleic acid has a length in the range of 17 to 30 nucleosides.

6. The method of claim 5, wherein the first strand of the nucleic acid has a length of 19 or 23 nucleosides.

7. The method of claim 1, wherein the second strand of the nucleic acid has a length in the range of 17 to 30 nucleosides.

8. The method of claim 7, wherein the second strand of the nucleic acid has a length of 19 to 21 nucleosides.

9. The method of claim 1, wherein the duplex region of the nucleic acid is between 17 and 30 nucleosides in length.

10. The method of claim 9, wherein the duplex region of the nucleic acid is 19 or 21 nucleosides in length.

11. The method of claim 1, wherein the region of complementarity between the first strand and the portion of RNA transcribed from the ZPI gene is between 17 and 30 nucleosides in length.

12. The method of claim 1, wherein the nucleic acid comprises one or more single-stranded nucleoside overhangs.

13. The method of claim 1, wherein the nucleic acid is an siRNA oligonucleoside.

14. The method of claim 1, wherein one or more nucleosides on the first strand and/or second strand of the nucleic acid are modified.

15. The method of claim 1, wherein the nucleic acid comprises one or more abasic nucleosides.

16. The method of claim 15, wherein the one or more abasic nucleosides are in a terminal region of the second strand of the nucleic acid, and/or wherein at least one abasic nucleoside is linked to an adjacent basic nucleoside through a reversed internucleoside linkage.

17. The method of claim 1, wherein the nucleic acid comprises one or more phosphorothioate internucleoside linkages.

18. The method of claim 1, wherein the nucleic acid is conjugated directly or indirectly to one or more ligand moieties.

19. The method of claim 18, wherein the one or more ligand moieties is present at a 3′ terminal region of the second strand of the nucleic acid.

20. The method of claim 1, wherein the nucleic acid is in a pharmaceutical composition comprising the nucleic acid and a pharmaceutically acceptable excipient or carrier.
